(19) United States
(12) Patent Application Publication
(10) Pub. No.: US 2020/0155598 A1
(43) Pub. Date: May 21, 2020

(54) Modified Cell Expressing Therapeutic Agent and Uses thereof

(71) Applicant: Innovative Cellular Therapeutics Co., Ltd, Shanghai (CN)

(72) Inventors: Lei Xiao, Shanghai (CN); Chengfei Pu, Shanghai (CN); Zhiyuan Cao, Shanghai (CN); He Sun, Shanghai (CN)

(73) Assignee: Innovative Cellular Therapeutics Co., Ltd, Shanghai (CN)

(21) Appl. No.: 16/445,965

(22) Filed: Jun. 19, 2019

Related U.S. Application Data
(60) Provisional application No. 62/848,961, filed on May 16, 2019.
(60) Provisional application No. 62/846,563, filed on May 10, 2019.
(60) Provisional application No. 62/828,770, filed on Apr. 3, 2019.
(60) Provisional application No. 62/795,810, filed on Jan. 23, 2019.
(60) Provisional application No. 62/769,987, filed on Nov. 20, 2018.

(51) Int. Cl. A61K 35/17; C07K 14/54; C07K 14/57; C07K 14/705; C07K 14/725; C07K 16/28

(52) U.S. Cl. CPC A61K 35/17; C07K 14/5412; C07K 14/57; C07K 14/70521; C07K 14/7051; A61K 2039/505; C07K 16/2803; C07K 2319/33; C07K 2319/30; C07K 2319/03; C07K 14/70578

(57) ABSTRACT

Compositions and methods for enhancing T cell response which increases the efficacy of CAR T cell therapy for treating cancer are described. Embodiments include a modified cell comprising an isolated nucleic acid comprising a first nucleic acid and a second nucleic acid, the first nucleic acid encoding a chimeric antigen receptor (CAR), the second nucleic acid encoding a therapeutic agent comprising at least one of IFN-γ, IL-2, IL-6, IL-7, IL-15, IL-17, and IL-23. The modified cell expresses and secretes the therapeutic agent.

### CROSS REFERENCE TO RELATED PATENT APPLICATIONS

[0001] This application claims the benefit of U.S. Provisional Application No. 62/848,961 filed May 16, 2019, entitled “Modified Cell Expressing Therapeutic Agent and Uses thereof,” U.S. Provisional Application No. 62/846,563 filed May 10, 2019, entitled “Modified Cell Expressing Therapeutic Agent and Uses thereof,” U.S. Provisional Application No. 62/828,770 filed Apr. 3, 2019, “Chimeric Antigen Receptor Cell Expressing Therapeutic Agent and Uses thereof,” U.S. Provisional Application No. 62/795,810 filed Jan. 23, 2019, entitled “Chimeric Antigen Receptor Cell Expressing Therapeutic Agent and Uses thereof,” U.S. Provisional Application No. 62/774,595 filed December 3, 2018, entitled “Chimeric Antigen Receptor Cell Expressing Therapeutic Agent and Uses thereof,” and U.S. Provisional Application No. 62/769,987 filed Nov. 20, 2018, entitled “Chimeric Antigen Receptor Cell Expressing Therapeutic Agent and Uses thereof,” which are hereby incorporated herein by reference in their entirety.

### SEQUENCE LISTING INFORMATION

[0002] A computer readable textfile, entitled “Sequence Listing_ST25.txt,” created on or about May 15, 2019 with a file size of about 1,181 KB, contains the sequence listing for this application and is hereby incorporated by reference in its entirety.

### TECHNICAL FIELD

[0003] The present disclosure relates to compositions and methods related to chimeric antigen receptor cell secreting therapeutic agent, and uses thereof in the treatment of diseases, including cancer.

### BACKGROUND

[0004] Cancer involves abnormal cell growth with the potential to invade or spread to other parts of the body. In humans, there are more than one hundred types of cancer. One example is breast cancer occurring in the epithelial tissue of the breast. Since breast cancer cells lose the characteristics of normal cells, the connection between breast cancer cells is lost. Once cancer cells are exfoliated, they spread over the entire body via the blood and/or lymph systems and therefore become life-threatening. Currently, breast cancer has become one of the common threats to women's physical and mental health. Although immunotherapy, for example CAR T cell therapy, has been proven to be effective for treating cancer, there is still a need to improve such immunotherapy so that it is more effective for certain cancers such as those involving solid tumors.

### SUMMARY

[0005] The present disclosure describes compositions and methods for enhancing T cell response. The present disclosure also describes cells comprising an isolated nucleic acid comprising a nucleic acid and an additional nucleic acid, the nucleic acid encoding a chimeric antigen receptor (CAR), the additional nucleic acid encoding a therapeutic agent comprising at least one of IFN-γ, IL-2, IL-6, IL-7, IL-15, IL-17, and IL-23. The cells express and secrete the therapeutic agent.

[0006] This Summary is not intended to identify key features or essential features of the claimed subject matter, nor is it intended to be used to limit the scope of the claimed subject matter.

### BRIEF DESCRIPTION OF THE DRAWINGS

[0007] The Detailed Description is described with reference to the accompanying figures. The use of the same reference numbers in different figures indicates similar or identical items.

[0008] FIG. 1 is a schematic diagram of an exemplary fusion protein.

[0009] FIG. 2 is a schematic diagram of another exemplary fusion protein.

[0010] FIG. 3 is a schematic diagram of yet another exemplary fusion protein.

[0011] FIG. 4 is a schematic diagram of yet another exemplary fusion protein.

[0012] FIG. 5 is a schematic diagram of an exemplary CAR molecule and a fusion protein.

[0013] FIG. 6 is a schematic diagram of an exemplary CAR molecule and a protein expressed by a modified cell.

[0014] FIG. 7 is a schematic diagram of another exemplary CAR molecule and one or more proteins expressed by a modified cell.

[0015] FIG. 8 is a schematic diagram of yet another exemplary CAR molecule and one or more proteins expressed by a modified cell.

[0016] FIG. 9 is a schematic diagram of yet another exemplary CAR molecule and one or more proteins expressed by a modified cell.

[0017] FIG. 10 is a schematic diagram of yet another exemplary CAR molecule and one or more proteins expressed by a modified cell.

[0018] FIG. 11 shows PET/CT images showing tumor changes before and after CAR T cell infusion.

[0019] FIGS. 12, 13, 14, and 15 show changes of cytokine release and other parameters in response to CAR T cell infusion.

[0020] FIG. 16 shows various parameters of the patient in response to CAR T cell infusion in a patient.

[0021] FIG. 17 shows various parameters of the patient in response to CAR T cell infusion in another patient.

[0022] FIG. 18 includes various constructs of CAR and therapeutic agents that may be expressed by T cells.

[0023] FIG. 19 shows flow cytometry assay results of T cells expressing various proteins shown in FIG. 18.

[0024] FIG. 20 shows IL6 release in response to CD3/CD28 Dynabeads activation.

[0025] FIG. 21 shows IL6 release in response to co-culturing with Nalm6 cells.

[0026] FIG. 22 shows IFNγ (i.e., IFNg) release in response to CD3/CD28 Dynabeads activation.

[0027] FIG. 23 shows IFNγ release in response to co-culturing with Nalm6 cells.

[0028] FIG. 24 shows toxicity assay with respect to CAR T cells.

[0029] FIGS. 25 and 26 show other IFNγ release in response to co-culturing with Nalm6 cells.

[0030] FIGS. 27 and 28 show IL12 and IFNγ release in response to CD3/CD28 Dynabeads activation.

[0031] FIGS. 29 and 30 show IL6 and IFNγ release in response to CD3/CD28 Dynabeads activation.

### DETAILED DESCRIPTION

[0032] Unless defined otherwise, all technical and scientific terms used herein have the same meaning as commonly understood by those of ordinary skill in the art to which the disclosure belongs. Although any method and material similar or equivalent to those described herein can be used in the practice or testing of the present disclosure, preferred methods and materials are described. For the purposes of the present disclosure, the following terms are defined below.

[0033] The articles “a” and “an” are used herein to refer to one or to more than one (i.e., to at least one) of the grammatical object of the article. By way of example, “an element” means one element or more than one element.

[0034] By “about” is meant a quantity, level, value, number, frequency, percentage, dimension, size, amount, weight or length that varies by as much as 20, 15, 10, 9, 8, 7, 6, 5, 4, 3, 2 or 1% to a reference quantity, level, value, number, frequency, percentage, dimension, size, amount, weight or length.

[0035] The term “activation,” as used herein, refers to the state of a cell that has been sufficiently stimulated to induce detectable cellular proliferation. Activation can also be associated with induced cytokine production and detectable effector functions. The term “activated T cells” refers to, among other things, T cells that are undergoing cell division.

[0036] The term “antibody” is used in the broadest sense and refers to monoclonal antibodies (including full length monoclonal antibodies), polyclonal antibodies, multi-specific antibodies (e.g., bispecific antibodies), and antibody fragments so long as they exhibit the desired biological activity or function. The antibodies in the present disclosure may exist in a variety of forms including, for example, polyclonal antibodies; monoclonal antibodies; Fv, Fab, Fab′, and F(ab)₂ and fragments; as well as single chain antibodies and humanized antibodies (Harlow et al., 1999, In: Using Antibodies: A Laboratory Manual, Cold Spring Harbor Laboratory Press, NY; Harlow et al., 1989, In: Antibodies: A Laboratory Manual, Cold Spring Harbor, N.Y.; Houston et al., 1988, Proc. Natl. Acad. Sci. USA 85:5879-5883; Bird et al., 1988, Science 242:423-426).

[0037] The term “antibody fragments” refers to a portion of a full-length antibody, for example, the antigen binding or variable region of the antibody. Other examples of antibody fragments include Fab, Fab′, F(ab′)2, and Fv fragments; diabodies; linear antibodies; single-chain antibody molecules; and multi-specific antibodies formed from antibody fragments.

[0038] The term “Fv” refers to the minimum antibody fragment which contains a complete antigen-recognition and -binding site. This fragment consists of a dimer of one heavy- and one light-chain variable region domain in tight, non-covalent association. From the folding of these two domains emanates six hypervariable loops (3 loops each from the H and L chain) that contribute amino acid residues for antigen binding and confer antigen binding specificity to the antibody. However, even a single variable domain (or half of an Fv including only three complementarity determining regions (CDRs) specific for an antigen) has the ability to recognize and bind antigen, although at a lower affinity than the entire binding site (the dimer).

[0039] An “antibody heavy chain,” as used herein, refers to the larger of the two types of polypeptide chains present in all antibody molecules in their naturally occurring conformations. An “antibody light chain,” as used herein, refers to the smaller of the two types of polypeptide chains present in all antibody molecules in their naturally occurring conformations. κ and λ light chains refer to the two major antibody light chain isotypes.

[0040] The term “synthetic antibody” refers to an antibody which is generated using recombinant DNA technology, such as, for example, an antibody expressed by a bacteriophage. The term also includes an antibody which has been generated by the synthesis of a DNA molecule encoding the antibody and the expression of the DNA molecule to obtain the antibody or to obtain an amino acid encoding the antibody. The synthetic DNA is obtained using technology that is available and well known in the art.

[0041] The term “antigen” refers to a molecule that provokes an immune response, which may involve either antibody production, or the activation of specific immunologically-competent cells, or both. Antigens include any macromolecule, including all proteins or peptides, or molecules derived from recombinant or genomic DNA. For example, DNA including a nucleotide sequence or a partial nucleotide sequence encoding a protein or peptide that elicits an immune response, and therefore, encodes an “antigen” as the term is used herein. An antigen need not be encoded solely by a full-length nucleotide sequence of a gene. An antigen can be generated, synthesized or derived from a biological sample including a tissue sample, a tumor sample, a cell, or a biological fluid.

[0042] The term “anti-tumor effect” as used herein, refers to a biological effect associated with a decrease in tumor volume, a decrease in the number of tumor cells, a decrease in the number of metastases, decrease in tumor cell proliferation, decrease in tumor cell survival, an increase in life expectancy of a subject having tumor cells, or amelioration of various physiological symptoms associated with the cancerous condition. An “anti-tumor effect” can also be manifested by the ability of the peptides, polynucleotides, cells, and antibodies in the prevention of the occurrence of tumor in the first place.

[0043] The term “auto-antigen” refers to an endogenous antigen mistakenly recognized by the immune system as being foreign. Auto-antigens include cellular proteins, phosphoproteins, cellular surface proteins, cellular lipids, nucleic acids, glycoproteins, including cell surface receptors.

[0044] The term “autologous” is used to describe a material derived from a subject which is subsequently re-introduced into the same subject.

[0045] The term “allogeneic” is used to describe a graft derived from a different subject of the same species. As an example, a donor subject may be a related or unrelated or recipient subject, but the donor subject has immune system markers which are similar to the recipient subject.

[0046] The term “xenogeneic” is used to describe a graft derived from a subject of a different species. As an example, the donor subject is from a different species than a recipient subject, and the donor subject and the recipient subject can be genetically and immunologically incompatible.

[0047] The term “cancer” is used to refer to a disease characterized by the rapid and uncontrolled growth of aberrant cells. Cancer cells can spread locally or through the bloodstream and lymphatic system to other parts of the body. Examples of various cancers include breast cancer, prostate cancer, ovarian cancer, cervical cancer, skin cancer, pancreatic cancer, colorectal cancer, renal cancer, liver cancer, brain cancer, lymphoma, leukemia, lung cancer, and the like.

[0048] Throughout this specification, unless the context requires otherwise, the words “comprise,” “includes” and “including” will be understood to imply the inclusion of a stated step or element or group of steps or elements but not the exclusion of any other step or element or group of steps or elements.

[0049] The phrase “consisting of” is meant to include, and is limited to, whatever follows the phrase “consisting of.” Thus, the phrase “consisting of” indicates that the listed elements are required or mandatory and that no other elements may be present.

[0050] The phrase “consisting essentially of” is meant to include any element listed after the phrase and can include other elements that do not interfere with or contribute to the activity or action specified in the disclosure for the listed elements. Thus, the phrase “consisting essentially of” indicates that the listed elements are required or mandatory, but that other elements are optional and may or may not be present depending upon whether or not they affect the activity or action of the listed elements.

[0051] The terms “complementary” and “complementarity” refer to polynucleotides (i.e., a sequence of nucleotides) related by the base-pairing rules. For example, the sequence “A-G-T,” is complementary to the sequence “T-C-A.” Complementarity may be “partial,” in which only some of the nucleic acids' bases are matched according to the base pairing rules, or there may be “complete” or “total” complementarity between the nucleic acids. The degree of complementarity between nucleic acid strands has significant effects on the efficiency and strength of hybridization between nucleic acid strands.

[0052] The term “corresponds to” or “corresponding to” refers to (a) a polynucleotide having a nucleotide sequence that is substantially identical or complementary to all or a portion of a reference polynucleotide sequence or encoding an amino acid sequence identical to an amino acid sequence in a peptide or protein; or (b) a peptide or polypeptide having an amino acid sequence that is substantially identical to a sequence of amino acids in a reference peptide or protein.

[0053] The term “co-stimulatory ligand,” refers to a molecule on an antigen presenting cell (e.g., an APC, dendritic cell, B cell, and the like) that specifically binds a cognate co-stimulatory molecule on a T cell, thereby providing a signal which, in addition to the primary signal provided by, for instance, binding of a TCR/CD3 complex with an MHC molecule loaded with peptide, mediates a T cell response, including at least one of proliferation, activation, differentiation, and other cellular responses. A co-stimulatory ligand can include B7-1 (CD80), B7-2 (CD86), PD-L1, PD-L2, 4-1BBL, OX40L, inducible co-stimulatory ligand (ICOS-L), intercellular adhesion molecule (ICAM), CD30L, CD40, CD70, CD83, HLA-G, MICA, MICB, HVEM, lymphotoxin beta receptor, 3/TR6, ILT3, ILT4, HVEM, a ligand for CD7, an agonist or antibody that binds the Toll ligand receptor and a ligand that specifically binds with B7-H3. A co-stimulatory ligand also includes, inter alia, an agonist or an antibody that specifically binds with a co-stimulatory molecule present on a T cell, such as CD27, CD28, 4-1BB, OX40, CD30, CD40, PD-1, ICOS, lymphocyte function-associated antigen-1 (LFA-1), CD2, CD7, LIGHT, NKG2C, B7-H3, and a ligand that specifically binds CD83.

[0054] The term “co-stimulatory molecule” refers to the cognate binding partner on a T cell that specifically binds with a co-stimulatory ligand, thereby mediating a co-stimulatory response by the T cell, such as proliferation. Co-stimulatory molecules include an MHC class I molecule, BTLA, and a Toll-like receptor.

[0055] The term “co-stimulatory signal” refers to a signal, which in combination with a primary signal, such as TCR/CD3 ligation, leads to T cell proliferation and/or upregulation or downregulation of key molecules. The terms “disease” and “condition” may be used interchangeably or may be different in that the particular malady or condition may not have a known causative agent (so that etiology has not yet been worked out), and it is therefore not yet recognized as a disease but only as an undesirable condition or syndrome, wherein a more or less specific set of symptoms have been identified by clinicians. The term “disease” is a state of health of a subject wherein the subject cannot maintain homeostasis, and wherein if the disease is not ameliorated then the subject's health continues to deteriorate. In contrast, a “disorder” in a subject is a state of health in which the animal is able to maintain homeostasis, but in which the animal's state of health is less favorable than it would be in the absence of the disorder. Left untreated, a disorder does not necessarily cause a further decrease in the animal's state of health.

[0056] The term “effective” refers to adequate to accomplish a desired, expected, or intended result. For example, an “effective amount” in the context of treatment may be an amount of a compound sufficient to produce a therapeutic or prophylactic benefit.

[0057] The term “encoding” refers to the inherent property of specific sequences of nucleotides in a polynucleotide, such as a gene, a cDNA, or an mRNA, to serve as a template for synthesis of other polymers and macromolecules in biological processes having either a defined sequence of nucleotides (i.e., rRNA, tRNA and mRNA) or a defined sequence of amino acids and the biological properties resulting therefrom. Thus, a gene encodes a protein if transcription and translation of mRNA corresponding to that gene produces the protein in a cell or other biological system. Both the coding strand, the nucleotide sequence of which is identical to the mRNA sequence (except that a “T” is replaced by a “U”) and is usually provided in sequence listings, and the non-coding strand, used as the template for transcription of a gene or cDNA, can be referred to as encoding the protein or other product of that gene or cDNA.

[0058] The term “exogenous” refers to a molecule that does not naturally occur in a wild- type cell or organism but is typically introduced into the cell by molecular biological techniques. Examples of exogenous polynucleotides include vectors, plasmids, and/or man-made nucleic acid constructs encoding the desired protein. With regard to polynucleotides and proteins, the term “endogenous” or “native” refers to naturally-occurring polynucleotide or amino acid sequences that may be found in a given wild-type cell or organism. Also, a particular polynucleotide sequence that is isolated from a first organism and transferred to a second organism by molecular biological techniques is typically considered an “exogenous” polynucleotide or amino acid sequence with respect to the second organism. In specific embodiments, polynucleotide sequences can be “introduced” by molecular biological techniques into a microorganism that already contains such a polynucleotide sequence, for instance, to create one or more additional copies of an otherwise naturally-occurring polynucleotide sequence, and thereby facilitate overexpression of the encoded polypeptide.

[0059] The term “expression” refers to the transcription and/or translation of a particular nucleotide sequence driven by its promoter.

[0060] The term “expression vector” refers to a vector including a recombinant polynucleotide including expression control (regulatory) sequences operably linked to a nucleotide sequence to be expressed. An expression vector includes sufficient cis-acting elements for expression; other elements for expression can be supplied by the host cell or in an in vitro expression system. Expression vectors include all those known in the art, such as cosmids, plasmids (e.g., naked or contained in liposomes) and viruses (e.g., lentiviruses, retroviruses, adenoviruses, and adeno-associated viruses) that incorporate the recombinant polynucleotide.

[0061] The term “homologous” refers to sequence similarity or sequence identity between two polypeptides or between two polynucleotides when a position in both of the two compared sequences is occupied by the same base or amino acid monomer subunit, e.g., if a position in each of two DNA molecules is occupied by adenine, then the molecules are homologous at that position. The percent of homology between two sequences is a function of the number of matching or homologous positions shared by the two sequences divided by the number of positions compared ×100. For example, if 6 of 10 of the positions in two sequences are matched or homologous, then the two sequences are 60% homologous. By way of example, the DNA sequences ATTGCC and TATGGC share 50% homology. A comparison is made when two sequences are aligned to give maximum homology.

[0062] The term “immunoglobulin” or “Ig,” refers to a class of proteins, which function as antibodies. The five members included in this class of proteins are IgA, IgG, IgM, IgD, and IgE. IgA is the primary antibody that is present in body secretions, such as saliva, tears, breast milk, gastrointestinal secretions and mucus secretions of the respiratory and genitourinary tracts. IgG is the most common circulating antibody. IgM is the main immunoglobulin produced in the primary immune response in most subjects. It is the most efficient immunoglobulin in agglutination, complement fixation, and other antibody responses, and is important in defense against bacteria and viruses. IgD is the immunoglobulin that has no known antibody function but may serve as an antigen receptor. IgE is the immunoglobulin that mediates immediate hypersensitivity by causing the release of mediators from mast cells and basophils upon exposure to the allergen.

[0063] The term “isolated” refers to a material that is substantially or essentially free from components that normally accompany it in its native state. The material can be a cell or a macromolecule such as a protein or nucleic acid. For example, an “isolated polynucleotide,” as used herein, refers to a polynucleotide, which has been purified from the sequences which flank it in a naturally-occurring state, e.g., a DNA fragment which has been removed from the sequences that are normally adjacent to the fragment. Alternatively, an “isolated peptide” or an “isolated polypeptide” and the like, as used herein, refer to in vitro isolation and/or purification of a peptide or polypeptide molecule from its natural cellular environment, and from association with other components of the cell.

[0064] The term “substantially purified” refers to a material that is substantially free from components that are normally associated with it in its native state. For example, a substantially purified cell refers to a cell that has been separated from other cell types with which it is normally associated in its naturally occurring or native state. In some instances, a population of substantially purified cells refers to a homogenous population of cells. In other instances, this term refers simply to a cell that has been separated from the cells with which they are naturally associated in their natural state. In embodiments, the cells are cultured in vitro. In embodiments, the cells are not cultured in vitro.

[0065] In the context of the present disclosure, the following abbreviations for the commonly occurring nucleic acid bases are used. “A” refers to adenosine, “C” refers to cytosine, “G” refers to guanosine, “T” refers to thymidine, and “U” refers to uridine.

[0066] Unless otherwise specified, a “nucleotide sequence encoding an amino acid sequence” includes all nucleotide sequences that are degenerate versions of each other and that encode the same amino acid sequence. The phrase nucleotide sequence that encodes a protein or an RNA may also include introns to the extent that the nucleotide sequence encoding the protein may in some version contain an intron(s).

[0067] The term “lentivirus” refers to a genus of the Retroviridae family. Lentiviruses are unique among the retroviruses in being able to infect non-dividing cells; they can deliver a significant amount of genetic information into the DNA of the host cell, so they are one of the most efficient methods of a gene delivery vector. Moreover, the use of lentiviruses enables integration of the genetic information into the host chromosome resulting in stably transduced genetic information. HIV, SIV, and FIV are all examples of lentiviruses. Vectors derived from lentiviruses offer the means to achieve significant levels of gene transfer in vivo.

[0068] The term “modulating,” refers to mediating a detectable increase or decrease in the level of a response in a subject compared with the level of a response in the subject in the absence of a treatment or compound, and/or compared with the level of a response in an otherwise identical but untreated subject. The term encompasses perturbing and/or affecting a native signal or response thereby mediating a beneficial therapeutic response in a subject, preferably, a human.

[0069] Nucleic acid is “operably linked” when it is placed into a functional relationship with another nucleic acid sequence. For example, DNA for a presequence or secretory leader is operably linked to DNA for a polypeptide if it is expressed as a preprotein that participates in the secretion of the polypeptide; a promoter or enhancer is operably linked to a coding sequence if it affects the transcription of the sequence; or a ribosome binding site is operably linked to a coding sequence if it is positioned so as to facilitate translation.

[0070] The term “under transcriptional control” refers to a promoter being operably linked to and in the correct location and orientation in relation to a polynucleotide to control (regulate) the initiation of transcription by RNA polymerase and expression of the polynucleotide.

[0071] The term “overexpressed” tumor antigen or “overexpression” of the tumor antigen is intended to indicate an abnormal level of expression of the tumor antigen in a cell from a disease area such as a solid tumor within a specific tissue or organ of the patient relative to the level of expression in a normal cell from that tissue or organ. Patients having solid tumors or a hematological malignancy characterized by overexpression of the tumor antigen can be determined by standard assays known in the art.

[0072] Cancers that may be treated include tumors that are not vascularized, or not yet substantially vascularized, as well as vascularized tumors. The cancers may include non-solid tumors (such as hematological tumors, for example, leukemias and lymphomas) or may include solid tumors. Types of cancers to be treated with the CARs of the disclosure include, but are not limited to, carcinoma, blastoma, and sarcoma, and certain leukemia or lymphoid malignancies, benign and malignant tumors, and malignancies, e.g., sarcomas, carcinomas, and melanomas. Adult tumors/cancers and pediatric tumors/cancers are also included.

[0073] Hematologic cancers are cancers of the blood or bone marrow. Examples of hematological (or hematogenous) cancers include leukemias, including acute leukemias (such as acute lymphocytic leukemia, acute myelocytic leukemia, acute myelogenous leukemia and myeloblastic, promyelocytic, myelomonocytic, monocytic and erythroleukemia), chronic leukemias (such as chronic myelocytic (granulocytic) leukemia, chronic myelogenous leukemia, and chronic lymphocytic leukemia), polycythemia vera, lymphoma, Hodgkin's disease, non-Hodgkin's lymphoma (indolent and high grade forms), multiple myeloma, Waldenstrom's macroglobulinemia, heavy chain disease, myelodysplastic syndrome, hairy cell leukemia and myelodysplasia.

[0074] Solid tumors are abnormal masses of tissue that usually do not contain cysts or liquid areas. Solid tumors can be benign or malignant. Different types of solid tumors are named for the type of cells that form them (such as sarcomas, carcinomas, and lymphomas). Examples of solid tumors, such as sarcomas and carcinomas, include fibrosarcoma, myxosarcoma, liposarcoma, chondrosarcoma, osteosarcoma, and other sarcomas, synovioma, mesothelioma, Ewing's tumor, leiomyosarcoma, rhabdomyosarcoma, colon carcinoma, lymphoid malignancy, pancreatic cancer, breast cancer, lung cancers, ovarian cancer, prostate cancer, hepatocellular carcinoma, squamous cell carcinoma, basal cell carcinoma, adenocarcinoma, sweat gland carcinoma, medullary thyroid carcinoma, papillary thyroid carcinoma, pheochromocytomas sebaceous gland carcinoma, papillary carcinoma, papillary adenocarcinomas, medullary carcinoma, bronchogenic carcinoma, renal cell carcinoma, hepatoma, bile duct carcinoma, choriocarcinoma, Wilms' tumor, cervical cancer, testicular tumor, seminoma, bladder carcinoma, melanoma, and CNS tumors (such as a glioma (such as brainstem glioma and mixed gliomas), glioblastoma (also known as glioblastoma multiforme), astrocytoma, CNS lymphoma, germinoma, medulloblastoma, Schwannoma craniopharyogioma, ependymoma, pinealoma, hemangioblastoma, acoustic neuroma, oligodendroglioma, menangioma, neuroblastoma, retinoblastoma, and brain metastases).

[0075] A solid tumor antigen is an antigen expressed on a solid tumor. In embodiments, solid tumor antigen is also expressed at low levels on healthy tissue. Examples of solid tumor antigens and their related disease tumors are provided in Table 1.

TABLE 1

| Solid Tumor antigen | Disease tumor |
|---|---|
| PRLR | Breast Cancer |
| CLCA1 | colorectal Cancer |
| MUC12 | colorectal Cancer |
| GUCY2C | colorectal Cancer |
| GPR35 | colorectal Cancer |
| CR1L | Gastric Cancer |
| MUC 17 | Gastric Cancer |
| TMPRSS11B | esophageal Cancer |
| MUC21 | esophageal Cancer |
| TMPRSS11E | esophageal Cancer |
| CD207 | bladder Cancer |
| SLC30A8 | pancreatic Cancer |
| CFC1 | pancreatic Cancer |
| SLC12A3 | Cervical Cancer |
| SSTR1 | Cervical tumor |
| GPR27 | Ovary tumor |
| FZD10 | Ovary tumor |
| TSHR | Thyroid Tumor |
| SIGLEC15 | Urothelial cancer |
| SLC6A3 | Renal cancer |
| KISS1R | Renal cancer |
| QRFPR | Renal cancer: |
| GPR119 | Pancreatic cancer |
| CLDN6 | Endometrial cancer/Urothelial cancer |
| UPK2 | Urothelial cancer (including bladder cancer) |
| ADAM12 | Breast cancer, pancreatic cancer and the like |
| SLC45A3 | Prostate cancer |
| ACPP | Prostate cancer |
| MUC21 | Esophageal cancer |
| MUC16 | Ovarian cancer |
| MS4Al2 | Colorectal cancer |
| ALPP | Endometrial cancer |
| CEA | Colorectal carcinoma |
| EphA2 | Glioma |
| FAP | Mesotelioma |
| GPC3 | Lung squamous cell carcinoma |
| IL13-Rα2 | Glioma |
| Mesothelin | Metastatic cancer |
| PSMA | Prostate cancer |
| ROR1 | Breast lung carcinoma |
| VEGFR-II | Metastatic cancer |
| GD2 | Neuroblastoma |
| FR-α | Ovarian carcinoma |
| ErbB2 | Carcinomasb |
| EpCAM | Carcinomasa |
| EGFRvIII | Glioma-Glioblastoma |
| EGFR | Glioma-NSCL cancer |
| tMUC 1 | Cholangiocarcinoma, Pancreatic cancer, Breast |
| | Cancer |
| B7-H3 | Ewing sarcoma (bone tumor), rhabdomyosarcoma, |
| | nephroblastoma, neuroblastoma and medulloblastoma |
| | (brain tumor) |

[0076] The term “parenteral administration” of a composition includes, e.g., subcutaneous (s.c.), intravenous (i.v.), intramuscular (i.m.), intrasternal injection, or infusion techniques.

[0077] The terms “patient,” “subject,” and “individual,” and the like are used interchangeably herein and refer to any human, or animal, amenable to the methods described herein. In certain non-limiting embodiments, the patient, subject, or individual is a human or animal. In embodiments, the term “subject” is intended to include living organisms in which an immune response can be elicited (e.g., mammals). Examples of subjects include humans, and animals such as dogs, cats, mice, rats, and transgenic species thereof.

[0078] A subject in need of treatment or in need thereof includes a subject having a disease, condition, or disorder that needs to be treated. A subject in need thereof also includes a subject that needs treatment for prevention of a disease, condition, or disorder. In embodiments, the disease, condition, or disorder is cancer.

[0079] The term “polynucleotide” or “nucleic acid” refers to mRNA, RNA, cRNA, rRNA, cDNA or DNA. The term typically refers to a polymeric form of nucleotides of at least 10 bases in length, either ribonucleotides or deoxynucleotides or a modified form of either type of nucleotide. The term includes all forms of nucleic acids including single and double-stranded forms of nucleic acids.

[0080] The terms “polynucleotide variant” and “variant” and the like refer to polynucleotides displaying substantial sequence identity with a reference polynucleotide sequence or polynucleotides that hybridize with a reference sequence under stringent conditions that are defined hereinafter. These terms also encompass polynucleotides that are distinguished from a reference polynucleotide by the addition, deletion or substitution of at least one nucleotide. Accordingly, the terms “polynucleotide variant” and “variant” include polynucleotides in which one or more nucleotides have been added or deleted or replaced with different nucleotides. In this regard, it is well understood in the art that certain alterations inclusive of mutations, additions, deletions, and substitutions can be made to a reference polynucleotide whereby the altered polynucleotide retains the biological function or activity of the reference polynucleotide or has increased activity in relation to the reference polynucleotide (i.e., optimized). Polynucleotide variants include, for example, polynucleotides having at least 50% (and at least 51% to at least 99% and all integer percentages in between, e.g., 90%, 95%, or 98%) sequence identity with a reference polynucleotide sequence described herein. The terms “polynucleotide variant” and “variant” also include naturally-occurring allelic variants and orthologs.

[0081] The terms “polypeptide,” “polypeptide fragment,” “peptide,” and “protein” are used interchangeably herein to refer to a polymer of amino acid residues and to variants and synthetic analogues of the same. Thus, these terms apply to amino acid polymers in which one or more amino acid residues are synthetic non-naturally occurring amino acids, such as a chemical analogue of a corresponding naturally occurring amino acid, as well as to naturally-occurring amino acid polymers. In certain aspects, polypeptides may include enzymatic polypeptides, or “enzymes,” which typically catalyze (i.e., increase the rate of) various chemical reactions.

[0082] The term “polypeptide variant” refers to polypeptides that are distinguished from a reference polypeptide sequence by the addition, deletion, or substitution of at least one amino acid residue. In certain embodiments, a polypeptide variant is distinguished from a reference polypeptide by one or more substitutions, which may be conservative or non-conservative. In certain embodiments, the polypeptide variant comprises conservative substitutions and, in this regard, it is well understood in the art that some amino acids may be changed to others with broadly similar properties without changing the nature of the activity of the polypeptide. Polypeptide variants also encompass polypeptides in which one or more amino acids have been added or deleted or replaced with different amino acid residues.

[0083] The term “promoter” refers to a DNA sequence recognized by the synthetic machinery of the cell or introduced synthetic machinery, required to initiate the specific transcription of a polynucleotide sequence. The term “expression control (regulatory) sequences” refers to DNA sequences necessary for the expression of an operably linked coding sequence in a particular host organism. The control (regulatory) sequences that are suitable for prokaryotes, for example, include a promoter, optionally an operator sequence, and a ribosome binding site. Eukaryotic cells are known to utilize promoters, polyadenylation signals, and enhancers.

[0084] The term “bind,” “binds,” or “interacts with” refers to a molecule recognizing and adhering to a second molecule in a sample or organism but does not substantially recognize or adhere to other structurally unrelated molecules in the sample. The term “specifically binds,” as used herein with respect to an antibody, refers to an antibody which recognizes a specific antigen, but does not substantially recognize or bind other molecules in a sample. For example, an antibody that specifically binds an antigen from one species may also bind that antigen from one or more species. But, such cross-species reactivity does not itself alter the classification of an antibody as specific. In another example, an antibody that specifically binds an antigen may also bind different allelic forms of the antigen. However, such cross reactivity does not itself alter the classification of an antibody as specific. In some instances, the terms “specific binding” or “specifically binding,” can be used in reference to the interaction of an antibody, a protein, or a peptide with a second chemical species, to mean that the interaction is dependent upon the presence of a particular structure (e.g., an antigenic determinant or epitope) on the chemical species; for example, an antibody recognizes and binds a specific protein structure rather than to any protein. If an antibody is specific for epitope “A,” the presence of a molecule containing epitope A (or free, unlabeled A), in a reaction containing labeled “A” and the antibody, will reduce the amount of labeled A bound to the antibody.

[0085] By “statistically significant,” it is meant that the result was unlikely to have occurred by chance. Statistical significance can be determined by any method known in the art. Commonly used measures of significance include the p-value, which is the frequency or probability with which the observed event would occur if the null hypothesis were true. If the obtained p-value is smaller than the significance level, then the null hypothesis is rejected. In simple cases, the significance level is defined at a p-value of 0.5 or less. A “decreased” or “reduced” or “lesser” amount is typically a “statistically significant” or a physiologically significant amount, and may include a decrease that is about 1.1, 1.2, 1.3, 1.4, 1.5, 1.6 1.7, 1.8, 1.9, 2, 2.5, 3, 3.5, 4, 4.5, 5, 6, 7, 8, 9, 10, 15, 20, 30, 40, or 50 or more times (e.g., 100, 500, 1000 times) (including all integers and decimal points in between and above 1, e.g., 1.5, 1.6, 1.7. 1.8, etc.) an amount or level described herein.

[0086] The term “stimulation,” refers to a primary response induced by binding of a stimulatory molecule (e.g., a TCR/CD3 complex) with its cognate ligand thereby mediating a signal transduction event, such as signal transduction via the TCR/CD3 complex. Stimulation can mediate altered expression of certain molecules, such as downregulation of TGF-β, and/or reorganization of cytoskeletal structures.

[0087] The term “stimulatory molecule” refers to a molecule on a T cell that specifically binds a cognate stimulatory ligand present on an antigen presenting cell. For example, a functional signaling domain derived from a stimulatory molecule is the zeta chain associated with the T cell receptor complex. The stimulatory molecule includes a domain responsible for signal transduction.

[0088] The term “stimulatory ligand” refers to a ligand that when present on an antigen presenting cell (e.g., an APC, a dendritic cell, a B-cell, and the like.) can specifically bind with a cognate binding partner (referred to herein as a “stimulatory molecule”) on a cell, for example a T cell, thereby mediating a primary response by the T cell, including activation, initiation of an immune response, proliferation, and similar processes. Stimulatory ligands are well-known in the art and encompass, inter alia, an MHC Class I molecule loaded with a peptide, an anti-CD3 antibody, a superagonist anti-CD28 antibody, and a superagonist anti-CD2 antibody.

[0089] The term “therapeutic” refers to a treatment and/or prophylaxis. A therapeutic effect is obtained by suppression, remission, or eradication of a disease state or alleviating the symptoms of a disease state.

[0090] The term “therapeutically effective amount” refers to the amount of the subject compound that will elicit the biological or medical response of a tissue, system, or subject that is being sought by the researcher, veterinarian, medical doctor or another clinician. The term “therapeutically effective amount” includes that amount of a compound that, when administered, is sufficient to prevent the development of, or alleviate to some extent, one or more of the signs or symptoms of the disorder or disease being treated. The therapeutically effective amount will vary depending on the compound, the disease and its severity and the age, weight, etc., of the subject to be treated.

[0091] The term “treat a disease” refers to the reduction of the frequency or severity of at least one sign or symptom of a disease or disorder experienced by a subject.

[0092] The term “transfected” or “transformed” or “transduced” refers to a process by which an exogenous nucleic acid is transferred or introduced into the host cell. A “transfected” or “transformed” or “transduced” cell is one which has been transfected, transformed, or transduced with exogenous nucleic acid. The cell includes the primary subject cell and its progeny.

[0093] The term “vector” refers to a polynucleotide that comprises an isolated nucleic acid and which can be used to deliver the isolated nucleic acid to the interior of a cell. Numerous vectors are known in the art including linear polynucleotides, polynucleotides associated with ionic or amphiphilic compounds, plasmids, and viruses. Thus, the term “vector” includes an autonomously replicating plasmid or a virus. The term also includes non-plasmid and non-viral compounds which facilitate the transfer of nucleic acid into cells, such as, for example, polylysine compounds, liposomes, and the like. Examples of viral vectors include adenoviral vectors, adeno-associated virus vectors, retroviral vectors, and others. For example, lentiviruses are complex retroviruses, which, in addition to the common retroviral genes gag, pol, and env, contain other genes with regulatory or structural function. Lentiviral vectors are well known in the art. Some examples of lentivirus include the Human Immunodeficiency Viruses: HIV-1, HIV-2, and the Simian Immunodeficiency Virus: SIV. Lentiviral vectors have been generated by multiply attenuating the HIV virulence genes, for example, the genes env, vif, vpr, vpu, and nef are deleted making the vector biologically safe.

[0094] Ranges: throughout this disclosure, various aspects of the disclosure can be presented in a range format. It should be understood that the description in range format is merely for convenience and brevity and should not be construed as an inflexible limitation on the scope of the disclosure. Accordingly, the description of a range should be considered to have specifically disclosed all the possible subranges as well as individual numerical values within that range. For example, description of a range such as from 1 to 6 should be considered to have specifically disclosed subranges such as from 1 to 3, from 1 to 4, from 1 to 5, from 2 to 4, from 2 to 6, from 3 to 6 etc., as well as individual numbers within that range, for example, 1, 2, 2.7, 3, 4, 5, 5.3, and 6. This applies regardless of the breadth of the range.

[0095] A “chimeric antigen receptor” (CAR) molecule is a recombinant polypeptide including at least an extracellular domain, a transmembrane domain and a cytoplasmic domain or intracellular domain. In embodiments, the domains of the CAR are on the same polypeptide chain, for example a chimeric fusion protein. In embodiments, the domains are on different polypeptide chains, for example the domains are not contiguous.

[0096] The extracellular domain of a CAR molecule includes an antigen binding domain. In embodiments, the antigen binding domain binds an antigen, for example, a cell surface molecule or marker, on the surface of a B cell. In embodiments, the cell surface molecule of a B cell includes CD19, CD22, CD20, BCMA, CD5, CD7, CD2, CD16, CD56, CD30, CD14, CD68, CD11b, CD18, CD169, CD1c, CD33, CD38, CD138, or CD13. In embodiments, the cell surface molecule of the B cell is CD19, CD20, CD22, or BCMA. In particular embodiments, the cell surface molecule of the B cell is CD19.

[0097] In embodiments, the antigen binding domain binds an antigen, on the surface of a tumor for example a tumor antigen or tumor marker. Tumor antigens are proteins that are produced by tumor cells that elicit an immune response, particularly T cell mediated immune responses. Tumor antigens are well known in the art and include, for example, tumor associated MUC1 (tMUC1), a glioma-associated antigen, carcinoembryonic antigen (CEA), β-human chorionic gonadotropin, alphafetoprotein (AFP), lectin-reactive AFP, thyroglobulin, RAGE-1, MN-CA IX, human telomerase reverse transcriptase, RU1, RU2 (AS), intestinal carboxyl esterase, mut hsp70-2, M-CSF, prostase, prostate-specific antigen (PSA), PAP, NY-ESO-1, LAGE-1a, p53, prostein, PSMA, Her2/neu, surviving, telomerase, prostate-carcinoma tumor antigen-1 (PCTA-1), MAGE, ELF2M, neutrophil elastase, ephrinB2, CD22, insulin growth factor (IGF)-I, IGF-II, IGF-I receptor and mesothelin. For example, when the tumor antigen is CD19, and the CAR thereof can be referred to as CD19CAR.

[0098] In embodiments, the extracellular antigen binding domain of a CAR includes at least one scFv or at least a single domain antibody. As an example, there can be two scFvs on a CAR. The scFv includes a light chain variable (VL) region and a heavy chain variable (VH) region of a target antigen-specific monoclonal antibody joined by a flexible linker. Single chain variable region fragments can be made by linking light and/or heavy chain variable regions by using a short linking peptide (Bird et al., Science 242:423-426, 1988). An example of a linking peptide is the GS linker having the amino acid sequence (GGGGS)3 (SEQ ID NO: 278), which bridges approximately 3.5 nm between the carboxy terminus of one variable region and the amino terminus of the other variable region. Linkers of other sequences have been designed and used (Bird et al., 1988, supra). In general, linkers can be short, flexible polypeptides and preferably comprised of about 20 or fewer amino acid residues. The single chain variants can be produced either recombinantly or synthetically. For synthetic production of scFv, an automated synthesizer can be used. For recombinant production of scFv, a suitable plasmid containing polynucleotide that encodes the scFv can be introduced into a suitable host cell, either eukaryotic, such as yeast, plant, insect or mammalian cells, or prokaryotic, such as E. coli. Polynucleotides encoding the scFv of interest can be made by routine manipulations such as ligation of polynucleotides. The resultant scFv can be isolated using standard protein purification techniques known in the art.

[0099] In embodiments, the CAR molecules described herein comprises one or more CDRs for binding an antigen of interest, for example, one or more CDRs of CD19 or tMUC1.

[0100] The cytoplasmic domain of the CAR molecules described herein includes one or more co-stimulatory domains and one or more signaling domains. The co-stimulatory and signaling domains function to transmit the signal and activate molecules, such as T cells, in response to antigen binding. The one or more co-stimulatory domains are derived from stimulatory molecules and/or co-stimulatory molecules, and the signaling domain is derived from a primary signaling domain, such as the CD3 zeta domain. In embodiments, the signaling domain further includes one or more functional signaling domains derived from a co-stimulatory molecule. In embodiments, the co-stimulatory molecules are cell surface molecules (other than antigens receptors or their ligands) that are required for activating a cellular response to an antigen.

[0101] In embodiments, the co-stimulatory domain includes the intracellular domain of CD27, CD28, 4-1BB, OX40, CD30, CD40, PD-1, ICOS, lymphocyte function-associated antigen-1 (LFA-1), CD2, CD7, LIGHT, NKG2C, B7-H3, a ligand that specifically binds CD83, or any combination thereof. In embodiments, the signaling domain includes a CD3 zeta domain derived from a T cell receptor.

[0102] In embodiments, the cytoplasmic domain of the CAR only includes one or more stimulatory domains and no signaling domain.

[0103] The CAR molecules also include a transmembrane domain. The incorporation of a transmembrane domain in the CAR molecules stabilizes the molecule. In embodiments, the transmembrane domain of the CAR molecules is the transmembrane domain of a CD28 or 4-1BB molecule.

[0104] Between the extracellular domain and the transmembrane domain of the CAR, there may be incorporated a spacer domain. As used herein, the term “spacer domain” generally means any oligo- or polypeptide that functions to link the transmembrane domain to, either the extracellular domain or, the cytoplasmic domain on the polypeptide chain. A spacer domain may include up to 300 amino acids, preferably 10 to 100 amino acids, and most preferably 25 to 50 amino acids.

### CAR Molecule(s) and Therapeutic Agent(s)

[0105] The present disclosure describes isolated nucleic acids including a (first) nucleic acid encoding a CAR and an additional (second) nucleic acid encoding one or more therapeutic agents. In embodiments, the first nucleic acid and the second nucleic acid are on separate isolated nucleic acids. In embodiments, the first and second nucleic acid are on the same isolated nucleic acid. In embodiments, the one or more therapeutic agents is IFN-γ, IL-2, IL-6, IL-7, IL-15, IL-17, IL-23, or a combination thereof. In embodiments, the therapeutic agent is Eomes, TRAF6, IL12, IL2, IL18, IL23, AQP9, Runx3, AMPK, BCL-2, or a combination thereof.

[0106] The present disclosure also describes isolated nucleic acids including a first nucleic acid encoding a first CAR and a second nucleic acid encoding the one or more therapeutic agents. Moreover, the present disclosure describes isolated nucleic acids including a third nucleic acid encoding a second (or additional) CAR. In embodiments, a separate isolated nucleic acid includes a nucleic acid encoding the second CAR. In embodiments, the first nucleic acid and the second nucleic acid are on separate isolated nucleic acids.

[0107] In embodiments, that first CAR includes an antigen binding domain that binds a solid tumor, and the second (or additional) CAR includes an antigen binding domain that binds a white blood cell (WBC).

[0108] The present disclosure also describes vectors including the isolated nucleic acids described above. In embodiments, a single vector contains the isolated nucleic acid encoding the first CAR, the therapeutic agent, and the second CAR or TCR. In embodiments, a first vector contains the first nucleic acid encoding a first CAR and a nucleic acid encoding one or more therapeutic agents, and a second vector contains the nucleic acid encoding the second CAR or TCR. In embodiments, the vector comprises an isolated nucleic acid encoding a bispecific CAR including at least two antigen binding domains and one or more therapeutic agents.

[0109] In embodiments, the present disclosure describes an isolated nucleic acid sequence comprising a nucleic acid sequence and an additional nucleic acid sequence, the nucleic acid sequence encoding a chimeric antigen receptor (CAR), the additional nucleic acid sequence encoding a therapeutic agent that is or comprises at least one of IL-2, IL-6, IL-7, IL-15, IL-17, and IL-23. In embodiments, the therapeutic agent is or comprises Eomes, TRAF6, IL12, IL2, IL18, IL23, AQP9, Runx3, AMPK, or BCL-2.

[0110] In embodiments, the present disclosure describes a pharmaceutical composition for treating a subject having a tumor using modified T cells, wherein the pharmaceutical composition comprises modified T cells comprising a first nucleic acid sequence encoding a chimeric antigen receptor (CAR) and a second nucleic acid encoding a therapeutic agent comprising IL-6, IFN-γ, or a combination thereof. In embodiments, the tumor is a solid tumor. In embodiments, the tumor is a liquid tumor (e.g., NHL). Embodiments relate to a method of causing or inducing T cell response in a subject in need thereof, the method comprising administering an effective amount of the pharmaceutical composition to the subject. The method described herein is effective in treating a subject diagnosed with cancer. In embodiments, the subject is diagnosed with a solid tumor.

[0111] Embodiments relate to certain cytokines, for example IL-6 and IFNγ, are selected to be expressed or overexpressed in T cells, which are used to treat tumors (e.g., solid and/or liquid tumors). These cytokines at least do not directly or indirectly weaken the killing function, capability of inhibiting tumor cells, and/or has severe side effects on T cell therapy. For example, these selected cytokines are capable of enhancing T cell response. Interestingly, IL-6 was considered as a cytokine that reduces or at least has a negative impact on T cell therapy since it is the major contributor to Cytokine Release Syndrome (CRS). However, the Examples provided herein show that the increase of IL-6 is consistent with the efficacy in treating Relapsed/Refractory (R/R) Acute Lymphoid Leukemia (ALL) using CAR T cell therapy. Surprisingly, the Examples provided herein show infusion of CAR T cells expressing and secreting IL-6 do not cause severe CRS for treating solid tumors. Not all cytokine can be expressed and secreted by T cells without sacrificing their function to kill tumor cells and/or inhibit tumor growth. The tumor-promoting effects of certain cytokines have been reported. For example, IL-10 production by TAMs can blunt anti-tumor responses by inhibiting the functions of APCs and subsequently block T cell effector functions such as cytotoxicity (Mannino, M. H., Zhu, Z., Xiao, H., Bai, Q., Wakefield, M. R., and Fang, Y. (2015). Studies in mouse tumor models have shown that IL-10 can suppress tumor-infiltrating DC maturation and their production of IL-12 to stimulate Th1 cells, unless IL-10 signaling is simultaneously blocked (Vicari, A. P., Chiodoni, C., Vaure, C., Ait-Yahia, S., Dercamp, C., Matsos, F., Reynard, O., Taverne, C., Merle, P., Colombo, M. P., et al. (2002). Reversal of tumor-induced dendritic cell paralysis by CpG immunostimulatory oligonucleotide and anti-interleukin 10 receptor antibody. J. Exp. Med. 196, 541-549.). As another example, studies have shown that TGF-β can be a potent inhibitor of T cell proliferation (Kehrl J H, Wakefield L M, Roberts A B, Jakowlew S, Alvarez-Mon M, et al. 1986. Production of transforming growth factor β (TGF-β) by human T lymphocytes and its potential role in the regulation of T cell growth. J. Exp. Med. 163:1037-50). Several mechanisms drive TGF-β-mediated inhibition of T cell proliferation, including suppression of IL-2 production, downregulation of c-myc, and upregulation of cyclin-dependent kinase inhibitors (Li M O, Wan Y Y, Sanjabi S, Robertson A K, Flavell R A. 2006. Transforming growth factor-β regulation of immune responses. Annu. Rev. Immunol. 24:99-146). In some contexts, TGF-β also plays an important role in promoting cell death to limit T cell expansion after activation (Mark A. Travis and Dean Sheppard, TGF-β Activation and Function in Immunity, Annu. Rev. Immunol. 2014. 32:51-82). Chemokines are a large family of cytokines that direct normal leukocyte migration. They also have been implicated in leukocyte development and in the pathogenesis of many diseases. Also, some chemokines' concentration gradients play an important role in intranodal T-cell migration. Overexpression of these chemokines would disrupt T cells migration, thus weakening CAR T cell therapy for solid tumor. Without proper migration, T cells may not be able to reach tumor cells. For example, it has been reported that overexpression of the chemokine CCL21 disrupts T cell migration (Christopherson K W and Campbell J J, Hromas R A, Transgenic overexpression of the CC chemokine CCL21 disrupts T-cell migration, Blood. 2001 Dec. 15; 98(13):3562-8). In embodiments, cytokines over-expressed or expressed in the modified cells does not include at least one of IL-10, TGF-β and CCL21. Certain cytokines can be overexpressed or expressed in T cells to enhance CAR T therapy treating tumors. However, some cytokines (e.g., IL-6) cannot be overexpressed or expressed in T cells to treat blood tumor. It is well-known that IL-6 is the major factor that contributes to severe CRS in CAR T treatment of blood tumors such as ALL and NHL. However, IL-6 can be overexpressed or expressed in T cells for the treatment of solid tumors because there are few studies reporting severe CRS in CAR T cell treatment of solid tumor. In embodiments, expression and secretion of IL-6 by T cells may be associated with a condition of T cells to avoid CRS and other syndromes related to IL-6. For example, IL-6 may be expressed and secreted by T cells when the T cells are activated. In embodiments, expression and secretion of IL-6 by CAR T cells may be regulated by a transcription modulator such as NFAT such that the CAR T cells may neither express nor secrete IL-6 unless they recognize and bind their antigen.

[0112] In embodiments, the modified T cells express and secrete the therapeutic agent. In embodiments, the therapeutic agent comprises IL-6 and IFN-γ. In embodiments, the modified T cell comprises nucleic acid sequences encoding SEQ ID NOS: 287 and 328. In embodiments, the modified T cell comprises the nucleic acid sequences comprises SEQ ID NOS: 286 and 469, and a nucleic acid sequence encodes SEQ ID NO: 328.

[0113] In embodiments, the CAR comprises an extracellular domain, a transmembrane domain, and an intracellular domain, the extracellular domain binds an antigen. In embodiments, the CAR binds tMUC 1, PRLR, CLCA1, MUC12, GUCY2C, GPR35, CR1L, MUC 17, TMPRSS11B, MUC21, TMPRSS11E, CD207, SLC30A8, CFC1, SLC12A3, SSTR1, GPR27, FZD10, TSHR, SIGLEC15, SLC6A3, KISS1R, QRFPR, GPR119, CLDN6, UPK2, ADAM12, SLC45A3, ACPP, MUC21, MUC16, MS4A12, ALPP, CEA, EphA2, FAP, GPC3, IL13-Rα2, Mesothelin, PSMA, ROR1, VEGFR-II, GD2, FR-α, ErbB2, EpCAM, EGFRvIII, PSCA, or EGFR. In embodiments, the intracellular domain comprises a co-stimulatory domain that comprises an intracellular domain of a co-stimulatory molecule selected from the group consisting of CD27, CD28, 4-1BB, OX40, CD30, CD40, PD-1, ICOS, lymphocyte function-associated antigen-1 (LFA-1), CD2, CD7, LIGHT, NKG2C, B7-H3, and any combination thereof. In embodiments, the antigen is Epidermal growth factor receptor (EGFR), Variant III of the epidermal growth factor receptor (EGFRvIII), Human epidermal growth factor receptor 2 (HER2), Mesothelin (MSLN), Prostate-specific membrane antigen (PSMA), Carcinoembryonic antigen (CEA), Disialoganglioside 2 (GD2), Interleukin-13Ra2 (IL13Rα2), Glypican-3 (GPC3), Carbonic anhydrase IX (CAIX), L1 cell adhesion molecule (L1-CAM), Cancer antigen 125 (CA125), Cluster of differentiation 133 (CD133), Fibroblast activation protein (FAP), Cancer/testis antigen 1B (CTAG1B), Mucin 1 (MUC1), Folate receptor-α (FR-α), CD19, FZD10, TSHR, PRLR, Muc 17, GUCY2C, CD207, CD3, CD5, B-Cell Maturation Antigen (BCMA), or CD4.

[0114] In embodiments, the therapeutic agent is present in the modified T cell in a recombinant DNA construct, in an mRNA, or in a viral vector. In embodiments, the modified T cell comprises a nucleic acid sequence comprising a promoter comprising a binding site for a transcription modulator that modulates the expression and/or secretion of the therapeutic agent in the modified cell. In embodiments, the transcription modulator is or comprises Hif1a, NFAT, FOXP3, or NFkB. In embodiments, the promoter is responsive to the transcription modulator. In embodiments, the promoter is operably linked to the nucleic acid sequence encoding the therapeutic agent such that the promoter drives expression and/or secretion of the therapeutic agent. In embodiments, the promoter comprises at least one of SEQ ID Nos: 323-325.

[0115] In embodiments, the CAR and the therapeutic agent are produced in the form of a polyprotein, which is cleaved to generate separate CAR and therapeutic agent molecules, and there is a cleavable moiety between the CAR and the therapeutic agent, the cleavable moiety comprises a 2A peptide, the 2A peptide comprises P2A or T2A.

[0116] In embodiments, the modified T cell comprises an additional (second) CAR, the CAR binds a solid tumor antigen, and the additional CAR binds an antigen of a white blood cell. In some embodiments, the solid tumor antigen is tMUC 1, PRLR, CLCA1, MUC12, GUCY2C, GPR35, CR1L, MUC 17, TMPRSS11B, MUC21, TMPRSS11E, CD207, SLC30A8, CFC1, SLC12A3, SSTR1, GPR27, FZD10, TSHR, SIGLEC15, SLC6A3, KISS1R, QRFPR, GPR119, CLDN6, UPK2, ADAM12, SLC45A3, ACPP, MUC21, MUC16, MS4A12, ALPP, CEA, EphA2, FAP, GPC3, IL13-Rα2, Mesothelin, PSMA, ROR1, VEGFR-II, GD2, FR-α, ErbB2, EpCAM, EGFRvIII, PSCA, or EGFR, and the antigen of the white blood cell is CD19, CD20, CD22, or BCMA. In embodiments, the modified cell comprises a dominant negative PD-1.

[0117] Embodiments relate to an isolated nucleic acid comprising a nucleic acid sequence and an additional nucleic acid sequence, the nucleic acid encoding a chimeric antigen receptor (CAR), the additional nucleic acid encoding a therapeutic agent that comprises at least one of TNFRSF superfamily member receptor activation antibodies or membrane-bound forms thereof, TNFRSF superfamily member ligands or the membrane-bound form thereof, chemokines or membrane-bound forms thereof, antibodies to the chemokines, or antibodies to receptors of the chemokines or the membrane-bound forms thereof, and D28 family's ligands that correspond to the sequences in Table 2-4. For example, TNFRSF superfamily member receptor includes tumor necrosis factor receptor 1, Tumor necrosis factor receptor 2, Lymphotoxin beta receptor, Lymphotoxin beta receptor, CD40, Fas receptor, Decoy receptor 3, CD27, CD30, 4-1BB, Death receptor 4, Death receptor 5, Decoy receptor 1, Decoy receptor 2, RANK, Osteoprotegerin, TWEAK receptor, TACI, BAFF receptor, Herpesvirus entry mediator, Nerve growth factor receptor , B-cell maturation antigen, Glucocorticoid-induced TNFR-related, TROY, Death receptor 6, Death receptor 3, Ectodysplasin A2 receptor, and the like.

[0118] In embodiments, the therapeutic agent includes an antibody reagent (e.g., a single chain antibody (e.g., scFv), a single domain antibody (e.g., a camelid antibody), or a bispecific antibody reagent (e.g., a bispecific T cell engager (BiTE)). In embodiments, the therapeutic agent includes a cytokine. Examples of the cytokines include IL-1P, IL-2, IL-4, IL-5, IL-6, IL-8, IL-10, IL-12, IL-13, IL-15, IL-17, IL-1Ra, IL-2R, IFN-γ, IFN-γ, MIP-In, MIP-IP, MCP-1, TNFα, GM-CSF, GCSF, CXCL9, CXCL10, CXCR factors, VEGF, RANTES, EOTAXIN, EGF, HGF, FGF-P, CD40, CD40L, ferritin, and any combination thereof. In embodiments, the cytokines include proinflammatory cytokines such as: IFN-γ, IL-15, IL-4, IL-10, TNFα, IL-8, IL-5, IL-6, GM-CSF, and MIP-Iα. For example, IFN-γ has been approved by FDA to treat patients with malignant osteoporosis (e.g., Journal of Pediatrics 121(1):119-24⋅August 1992).

[0119] T present disclosure describes a population of CAR cells comprising the nucleic acid and the additional nucleic acid, wherein the CAR cells comprise lymphocyte, leukocyte, or PBMC. In embodiments, the CAR and the therapeutic agent are produced in the form of a polyprotein, which is cleaved to generate separate CAR and therapeutic agent molecules. In embodiments, the polyprotein comprises a cleavable moiety between the CAR and the therapeutic agent, the cleavable moiety comprising a 2A peptide, the 2A peptide comprises P2A or T2A. In embodiments, the CAR and the therapeutic agent are each constitutively expressed. In embodiments, the CAR cells comprise: a third nucleic acid sequence encoding an additional CAR binding to an antigen that is different from the CAR, or the additional CAR binding a solid tumor antigen, and the CAR binds an antigen of a white blood cell. In embodiments, the therapeutic agent or its variants can be produced either recombinantly or synthetically. For synthetic production of the therapeutic agent, an automated synthesizer can be used. For recombinant production of the therapeutic agent, a suitable plasmid containing polynucleotide that encodes the therapeutic agent can be introduced into a suitable host cell, either eukaryotic, such as yeast, plant, insect or mammalian cells, or prokaryotic, such as E. coli. Polynucleotides encoding the therapeutic agent of interest can be made by routine manipulations such as ligation of polynucleotides. The resultant therapeutic agent can be isolated using standard protein purification techniques known in the art.

[0120] The present disclosure describes a pharmaceutical composition comprising the population of the CAR cells. Embodiments relate to a method of inducing or enhancing T cell response in a subject in need thereof and/or treating a tumor of the subject, the method comprising administering an effective amount of the composition to the subject.

[0121] The present disclosure describes a modified cell comprising one or more CARs, wherein the cell is engineered to express and secrete one or more therapeutic agents comprising at least one of IL-2, IL-6, IL-7, IL-15, IL-17, and IL-23. In embodiments, the cell is engineered to express the therapeutic agent, which is bound to the membrane of the modified cell.

[0122] The present disclosure describes a method of causing or enhancing T cell response, treating cancer, or enhancing cancer treatment, the method comprising: administrating an effective amount of the composition of T cells comprising one or more CARs, wherein the cell is engineered to express and secrete a therapeutic agent that is or comprises at least one of IL-2, IL-6, IL-7, IL-15, IL-17, and IL-23, and the T cell response is enhanced as compared to the administration of T cells that do not express or secrete the therapeutic agent.

[0123] The present disclosure describes a method of causing or enhancing T cell response, treating cancer, or enhancing cancer treatment, the method comprising: administering an effective amount of the composition of a population of T cells comprising a CAR; and administering an effective amount of a therapeutic agent comprising at least one of IL-2, IL-6, IL-7, IL-15, IL-17, and IL-23, wherein the T cell response is enhanced as compared to the administration of CAR T cells without the administration of therapeutic agent. In embodiments, the administering the effective amount of the therapeutic agent comprises intravenous delivery of an amount of human IL-6 in the range of about 0.5-50 ug per kilogram of body weight. In embodiments, the therapeutic agent is IL-6 or IL-7.

[0124] In embodiments, the method further comprises monitoring a concentration of the therapeutic agent in tissue or blood of the subject; and administering an antagonist of receptors of the therapeutic agent or the therapeutic agent (e.g., antibodies) if the concentration and/or other parameters of the subject are not in a desired condition. For example, the parameters may include a level of body temperatures, a level CRS, and a level of neuronal toxicity etc.

[0125] In embodiments, the expression and/or secretion of the therapeutic agent may be is regulated by an inducible expression system. In embodiments, the inducible expression system is a rtTA-TRE system, which increases or activates the expression of therapeutic agent, or a combination thereof. In embodiments, the inducible expression system is the rtTA-TRE system. For example, Tetracycline-Controlled Transcriptional Activation is a method of inducible gene expression where transcription is reversibly turned on or off in the presence of the antibiotic tetracycline or one of its derivatives (e.g., doxycycline). In embodiments, the expression and/or secretion of the therapeutic agent may be regulated by an inducible expression system and/or the modified cell comprises a nucleic acid sequence encoding an inducible suicide system. For example, the inducible suicide system is an HSV-TK system or an inducible caspase-9 system.

[0126] In embodiments, the T cell comprises an additional (second) CAR binding an antigen of a WBC, and the first CAR binds an antigen of a solid tumor. In embodiments, the solid tumor antigen is tMUC 1, PRLR, CLCA1, MUC12, GUCY2C, GPR35, CR1L, MUC 17, TMPRSS11B, MUC21, TMPRSS11E, CD207, SLC30A8, CFC1, SLC12A3, SSTR1, GPR27, FZD10, TSHR, SIGLEC15, SLC6A3, KISS1R, QRFPR, GPR119, CLDN6, UPK2, ADAM12, SLC45A3, ACPP, MUC21, MUC16, MS4A12, ALPP, CEA, EphA2, FAP, GPC3, IL13-Rα2, Mesothelin, PSMA, ROR1, VEGFR-II, GD2, FR-α, ErbB2, EpCAM, EGFRvIII, PSCA, or EGFR, and the B cell antigen is CD19, CD20, CD22, or BCMA.

[0127] In embodiments, the CAR comprises an extracellular domain, a transmembrane domain, and an intracellular domain, the extracellular domain binds an antigen.

[0128] In embodiments, the intracellular domain comprises a co-stimulatory domain that comprises an intracellular domain of a co-stimulatory molecule selected from the group consisting of CD27, CD28, 4-1BB, OX40, CD30, CD40, PD-1, ICOS, lymphocyte function-associated antigen-1 (LFA-1), CD2, CD7, LIGHT, NKG2C, B7-H3, and any combination thereof.

[0129] In embodiments, the antigen is Epidermal growth factor receptor (EGFR), Variant III of the epidermal growth factor receptor (EGFRvIII), Human epidermal growth factor receptor 2 (HER2), Mesothelin (MSLN), Prostate-specific membrane antigen (PSMA), Carcinoembryonic antigen (CEA), Disialoganglioside 2 (GD2), Interleukin-13Ra2 (IL13Rα2), Glypican-3 (GPC3), Carbonic anhydrase IX (CAIX), L1 cell adhesion molecule (L1-CAM), Cancer antigen 125 (CA125), Cluster of differentiation 133 (CD133), Fibroblast activation protein (FAP), Cancer/testis antigen 1B (CTAG1B), Mucin 1 (MUC1), Folate receptor-α (FR-α), CD19, FZD10, TSHR, PRLR, Muc 17, GUCY2C, CD207, CD3, CD5, B-Cell Maturation Antigen (BCMA), or CD4.

[0130] In embodiments, the modified cell or T cells comprise a dominant negative PD-1 mutant such that PD-1/PDI-1 signaling pathway of the cell is interfered.

[0131] In embodiments, the therapeutic agent is present in the modified cell in a recombinant DNA construct, in an mRNA, or in a viral vector. In embodiments, the modified cell comprises a therapeutic agent mRNA encoding the therapeutic agent, and the mRNA is not integrated into the genome of the modified cell. In embodiments, the therapeutic agent mRNA may be introduced (e.g., electroporated) into the modified cell such that the expression and/or secretion of the therapeutic agent is transient. Synthetic mRNAs can be injected to achieve transient gene expression. For example, the therapeutic agent supplied by the mRNA is short-lived such that the release of the therapeutic agent is controllable, especially for proinflammatory cytokines such as: IFN-γ, IL-4, IL-10, TNFα, IL-8, IL-5, IL-6, GM-CSF, and MIP-Iα.

[0132] In embodiments, the therapeutic agent comprises or is at least one listed in Table 2. In embodiments, the therapeutic agent comprises or has the sequence listed in Table 2.

[0133] In embodiments, the modified cell includes a nucleic acid sequence comprising the isolated nucleic acids described herein, wherein the isolated nucleic acid includes a promoter comprising a binding site for a transcription modulator (e.g., transcription factors) that modulates the expression of the therapeutic agent in the cell. Examples of the isolated nucleic acid sequence are provided in Table 2-4. These constructs may be placed into vectors (e.g., lentiviral vectors) either in a forward or reverse direction. In embodiments, the transcription modulator includes Hif1a, NFAT, FOXP3, and/or NFkB. In embodiments, the promoter is responsive to the transcription modulator. In embodiments, the promoter is operably linked to the nucleic acid sequence encoding the therapeutic agent, such that the promoter drives expression of the therapeutic agent in the cell. In embodiments, the therapeutic agent is ligated to a specific promoter such as to induce expression of the therapeutic agent in a desired condition. The promoter is divided into two parts, a specific regulatory region containing a transcription factor binding site, plus a minimal promoter. In embodiments, the promoter and the binding site includes the sequences listed in Table 2-4. More information about NFAT may be found at WO2018006882, which is incorporated herein by reference.

[0134] Embodiments relate to an isolated nucleic acid sequence comprising a (first) nucleic acid and an additional (second) nucleic acid sequence, the first nucleic acid encoding a chimeric antigen receptor (CAR), the second nucleic acid encoding a therapeutic agent. For example, the therapeutic agent comprises IL-6 or IFN-γ, or a combination thereof. For example, the therapeutic agent comprises IL-15 or IL-12, or a combination thereof. Embodiments relate to a population of CAR cells comprising the isolated nucleic acid, wherein the CAR cells comprise lymphocyte, leukocyte, or PBMC. In embodiments, the population of CAR cells comprise the CAR and the therapeutic agent produced in the form of a polyprotein, which is cleaved to generate separate CAR and therapeutic agent molecules. In embodiments, the polyprotein comprises a cleavable moiety between the CAR and the therapeutic agent, the cleavable moiety comprises a 2A peptide, the 2A peptide comprising P2A or T2A. In embodiments, the CAR and the therapeutic agent are each constitutively expressed. In embodiments, the CAR cells comprise: a third nucleic acid sequence encoding a second CAR binding to an antigen that is different from the first CAR. In embodiments, the second CAR binds a solid tumor antigen, and the first CAR binds an antigen of a white blood cell.

[0135] Embodiments relate to a pharmaceutical composition comprising the population of the cells including one or more CAR molecules (the CAR cells) and one or more therapeutic agents. Embodiments also relate to a method of inducing or causing T cell response in a subject in need thereof, the method comprising administering an effective amount of the pharmaceutical composition described herein to the subject. In embodiments, the CAR cell or the modified cell is a T cell, a NK cell, a macrophage or a dendritic cell. In embodiments, the CAR cell or the modified cell is a T cell.

[0136] In embodiments, the additional (second) nucleic acid comprises two nucleic acids, one encoding IL6 and one encoding IFN-γ, and the two nucleic acids are connected by an IRES element or another nucleic acid encoding a 2A peptide. In embodiments, the additional (second) nucleic acid comprises the nucleic acid sequence of SEQ ID NOs: 287 or 328, or a combination thereof. In embodiments, expression of the additional (second) nucleic acid is regulated by a conditional expression system such that the therapeutic agent is expressed in response to binding of a target antigen. In embodiments, expression of the additional nucleic acid sequence is regulated by SynNotch polypeptide.

[0137] Embodiments relate to a FC fusion protein associated with a small protein (e.g., a cytokine) as described above. In embodiments, the therapeutic agent may comprise the FC fusion protein. For example, cytokines such as IL15, IFN-γ or IL6 may be linked to one or more immunoglobin Fc domains. In embodiments, the Fc domain folds independently and may improve the solubility and stability of the small protein both in vitro and in vivo. In embodiments, the Fc region allows for easy cost-effective purification by protein-G/A affinity chromatography during manufacture. In embodiments, the FC fusion protein may be modified to polymerize into well-defined complexes containing multiple small proteins. In embodiments, the fusion protein may be expressed and secreted by the modified cell (e.g., a CAR T cell), which is used to treat a subject with cancer and/or other diseases. In embodiments, administration of the fusion protein may be combined with treatment of CAR T cells expressing and secreting the fusion protein. For example, a method for enhancing T cell response and/or treating a subject with cancer or other diseases may comprise administrating a fusion protein associated with the small protein (e.g., IFN-γ) to a subject and administrating an effective amount of the composition of a population of T cells comprising a CAR and expressing as well as secreting the fusion protein associated with the small protein to the subject. In embodiments, the administration of the fusion protein may enhance expansion of the CAR T cells during the early stage of the CAR T treatment (e.g., 1, 2, 3, 4, 5, or 6 days after the infusion of the CAR T cells). For example, the fusion protein may be administrated into the subject 1, 2, 3, 4, 5, or 6 days after the infusion of the CAR T cells. In embodiments, the method may comprise administrating a fusion protein associated with the small protein (e.g., IFN-γ) to a subject and administrating an effective amount of the composition of a population of T cells comprising a CAR without expressing or secreting the fusion protein associated with the small protein to the subject. For example, the fusion protein may be administrated into the subject for a predetermined time. More information about the FC fusion protein may be found at J Immunol 2004; 172:2925-2934 and EM BO Mol Med. 2012 October; 4(10): 1015-1028, which are incorporated by reference. More information about administration of the therapeutic agent (e.g. cytokines) may be fund at J Interferon Cytokine Res. 2019 January; 39(1):6-21, which is incorporated by reference.

[0138] Embodiments relate to a modified cell comprising one or more CARs, wherein the cell is engineered to express and secrete one or more therapeutic agents. For example, the therapeutic agent comprises IL-6 or IFN-γ, or a combination thereof. Embodiments relate to a method of inducing or enhancing T cell response, treating cancer, or enhancing cancer treatment, the method comprising: administrating an effective amount of the pharmaceutical composition of T cells comprising one or more CARs, wherein the cell is engineered to express and secrete one or more therapeutic agents. For example, the therapeutic agent comprises IL-6 or IFN-γ, or a combination thereof. In embodiments, the therapeutic agent is a small protein associated with IL-6 or IFN-γ. For example, administration of IL-15 to a subject may increase concentrations of IL-6 and IFN-γ up to 50-fold in the blood of the patient. Embodiments relate to a method of causing or enhancing T cell response, treating cancer, or enhancing cancer treatment, the method comprising: administering an effective amount of the composition of a population of T cells comprising a CAR; and administering an effective amount of a therapeutic agent. For example, therapeutic agent comprises IL-6 or IFN-γ, or a combination thereof. In embodiments, the CAR cells, the modified cell, the cell is a T cell, a NK cell, a macrophage or a dendritic cell. For example, the CAR cells, the modified cell, the cell is a T cell. Embodiments relate to a method for enhancing T cell response and/or treating a subject with cancer or other diseases may comprise administrating a therapeutic agent (e.g., a recombinant or native IFN-γ) to a subject and administrating an effective amount of a composition comprising a population of T cells comprising a CAR and expressing as well as secreting one or more therapeutic agents in the subject. In embodiments, the therapeutic agent may enhance expansion of the CAR T cells during the early stage of the CAR T treatment (e.g., 1, 2, 3, 4, 5, or 6 days after the infusion of the CAR T cells). For example, the therapeutic agent may be administrated into the subject 1, 2, 3, 4, 5, or 6 days after the infusion of the CAR T cells. In embodiments, the method may comprise administrating a therapeutic agent to a subject and administrating an effective amount of the composition of a population of T cells comprising a CAR without expressing or secreting the therapeutic to the subject. For example, the therapeutic agent may be administrated into the subject for a predetermined time. In embodiments, the therapeutic agent may be modified such that the biological and/or pharmacological properties of the therapeutic agent may be enhanced. For example, the hybrid FC fusion technology may be implemented to the solubility and/or stability of an active ingredient of the therapeutic agent.

[0139] In embodiments, the therapeutic agent may be isolated, synthetic, native, or recombinant human cytokines. For example, Recombinant human IL-15 may be administered as a daily bolus infusion for predetermined time days at 3 mcg/kg/day and 1 mcg/kg/day. Recombinant human IFN-γ may be administered at a dose of 2 million units daily for 5 days per week over predetermined time. In embodiments, the administering the effective amount of the therapeutic agent comprises administering an effective amount of the therapeutic agent such that concentrations of IL-6 and/or IFN-γ in the blood of the subject may increase 5-1000 times (e.g., 50 times). For example, the therapeutic agent comprises IL-15.

[0140] In embodiments, T cell response is enhanced as compared to the administration of T cells that do not express or secrete the therapeutic agent, or the T cell response is enhanced as compared to the administration of CAR T cells without the administration of therapeutic agent.

[0141] In embodiments, expression and/or secretion of the therapeutic agent is regulated by an inducible expression system and/or the modified cell comprises a nucleic acid sequence encoding an inducible suicide system. In embodiments, the inducible expression system is the rtTA-TRE system. In embodiments, the inducible suicide system is an HSV-TK system or an inducible caspase-9 system.

[0142] In embodiments, the modified T cells express and/or secrete the one or more therapeutic agents in response to the activation of the modified T cells. Such conditional expression and/or secretion may be implemented in various manners. The expression and/or secretion of the one or more therapeutic agents in the modified cell may be modulated by a transcription modulator (e.g., N FAT). TRUCKs (T cells redirected for universal cytokine killing), CAR-redirected T cells, may be used to express and/or secrete the one or more therapeutic agents when these T cells are activated. The expression and/or secretion of the one or more therapeutic agents in the modified cell may also be regulated by a SynNotch polypeptide.

[0143] In embodiments, a range of concentration values of IL6 is 60 to 5000 pg/ml, 200-5000 pg/ml, or 2000-5000 pg/ml in the blood of the subject. In embodiments, a range of concentration values IFN-γ is 20 to 5000 pg/ml, 200 to 5000 pg/ml, or 500 to 5000 pg/ml in the blood of the subject. In embodiments, the administering an effective amount of the therapeutic agent comprises intravenous delivery of an amount of human IL-6 in the range of about 0.5-50 ug per kilogram of body weight. In embodiments, the modified cell expresses the therapeutic agent such that concentrations of IL-6 and/or IFN-γ in the blood of the subject may increase 5-1000 times (e.g., 50 times). For example, the therapeutic agent comprises IL-15. More detailed information about IFN-γ clinical uses may be found at Cancer Med. 2018, 7: 4509-4516, which is incorporated by reference.

[0144] In embodiments, the modified cells or the T cells comprise an additional (second) CAR binding an antigen of a WBC, and the CAR binds an antigen of a solid tumor. In embodiments, the solid tumor antigen is tMUC 1, PRLR, CLCA1, MUC12, GUCY2C, GPR35, CR1L, MUC 17, TMPRSS11B, MUC21, TMPRSS11E, CD207, SLC30A8, CFC1, SLC12A3, SSTR1, GPR27, FZD10, TSHR, SIGLEC15, SLC6A3, KISS1R, QRFPR, GPR119, CLDN6, UPK2, ADAM12, SLC45A3, ACPP, MUC21, MUC16, MS4A12, ALPP, CEA, EphA2, FAP, GPC3, IL13-Rα2, Mesothelin, PSMA, ROR1, VEGFR-II, GD2, FR-α, ErbB2, EpCAM, EGFRvIII, PSCA, or EGFR, and the B cell antigen is CD19, CD20, CD22, or BCMA.

[0145] In embodiments, the modified cells or the T cells comprise a dominant negative PD-1. In embodiments, the modified cell or the T cells comprise a modified PD-1 lacking a functional PD-1 intracellular domain.

[0146] In embodiments, the CAR comprises an extracellular domain, a transmembrane domain, and an intracellular domain, the extracellular domain binds an antigen. In embodiments, the intracellular domain comprises a co-stimulatory domain that comprises an intracellular domain of a co-stimulatory molecule selected from the group consisting of CD27, CD28, 4-1BB, OX40, CD30, CD40, PD-1, ICOS, lymphocyte function-associated antigen-1 (LFA-1), CD2, CD7, LIGHT, NKG2C, B7-H3, and one combination thereof. In embodiments, the antigen is Epidermal growth factor receptor (EGFR), Variant III of the epidermal growth factor receptor (EGFRvIII), Human epidermal growth factor receptor 2 (HER2), Mesothelin (MSLN), Prostate-specific membrane antigen (PSMA), Carcinoembryonic antigen (CEA), Disialoganglioside 2 (GD2), Interleukin-13Ra2 (IL13Rα2), Glypican-3 (GPC3), Carbonic anhydrase IX (CAIX), L1 cell adhesion molecule (L1-CAM), Cancer antigen 125 (CA125), Cluster of differentiation 133 (CD133), Fibroblast activation protein (FAP), Cancer/testis antigen 1B (CTAG1B), Mucin 1 (MUC1), Folate receptor-α (FR-α), CD19, FZD10, TSHR, PRLR, Muc 17, GUCY2C, CD207, CD3, CD5, B-Cell Maturation Antigen (BCMA), or CD4.

[0147] In embodiments, the therapeutic agent is present in the modified cell in a recombinant DNA construct, in an mRNA, or in a viral vector. In embodiments, the modified cell comprises a therapeutic agent mRNA encoding the therapeutic agent, and the mRNA is not integrated into the genome of the modified cell. In embodiments, the modified cell comprises a nucleic acid sequence comprising a promoter which comprises a binding site for a transcription modulator that modulates the expression and/or secretion of the therapeutic agent in the cell. In embodiments, the transcription modulator includes Hif1a, NFAT, FOXP3, and/or NFkB. In embodiments, the promoter is responsive to the transcription modulator. In embodiments, the promoter is operably linked to the nucleic acid sequence encoding the therapeutic agent such that the promoter drives expression and/or secretion of the therapeutic agent in the cell. In embodiments, the promoter comprises at least one of SEQ ID Nos: 323-325.

[0148] In embodiments, the CAR cells, the modified cell, the cell is a T cell, a NK cell, a macrophage or a dendritic cell. For example, the CAR cells, the modified cell, the cell is a T cell.

[0149] In embodiments, the population of cells described herein is used in autologous CAR T cell therapy. In embodiments, the CAR T cell therapy is allogenic CAR T cell therapy, TCR T cell therapy, and NK cell therapy.

### CAR Molecules

[0150] In addition to the embodiments described above, the present disclosure describes isolated nucleic acids encoding at least two different antigen binding domains. In embodiments, there is a first antigen binding domain that binds an antigen on the surface of a WBC, and there is a second antigen binding domain that binds an antigen on a tumor that is different from the antigen on the surface of a WBC. The first antigen binding domain functions to expand the cells that it is introduced into, while the second antigen binding domain functions to inhibit the growth of or kill tumor cells containing the target tumor antigen upon binding to the target antigen. In embodiments, an isolated nucleic acid described herein encodes both the first and second antigen binding domains on the same nucleic acid molecule. In embodiments, the two antigen binding domains are encoded by two separate nucleic acid molecules. For example, a first nucleic acid encodes a first antigen binding domain and a second nucleic acid encodes a second antigen binding domain.

[0151] In embodiments, the present disclosure describes nucleic acids encoding a first antigen binding domain of a binding molecule and a second antigen binding domain of a binding molecule, wherein first antigen binding domain binds a cell surface molecule of a WBC, and the second antigen binding domain binds an antigen different from the cell surface molecule of the WBC. In embodiments, the second binding domain does not bind a B cell marker. In embodiments, the second binding domain includes a scFv comprising an amino acid sequence of SEQ ID No: 264 or 265. For example, the second antigen binding domain is on a CAR having one of the amino acid sequences of SEQ ID Nos: 271-277.

[0152] In embodiments, the first and second antigen binding domains can be on two different binding molecules (first and second binding molecules) such as a first CAR and a second CAR. As an example, a first CAR includes an extracellular binding domain that binds a marker on the surface of a B cell, and a second CAR includes an extracellular binding domain that binds a target antigen of a tumor cell. In embodiments, the first CAR and second CAR are encoded by different nucleic acids. In embodiments, the first CAR and second CAR are two different binding molecules but are encoded by a single nucleic acid.

[0153] In embodiments, the two different antigen binding domains can be on the same binding molecule, for example on a bispecific CAR, and encoded by a single nucleic acid. In embodiments, the bispecific CAR can have two different scFv molecules joined together by linkers.

[0154] In embodiments, the two different antigen binding domains can be on a CAR and a T cell receptor (TCR) and are encoded by separate nucleic acids. The binding domain of a TCR can target a specific tumor antigen or tumor marker on the cell of a tumor. In embodiments the TCR binding domain is a TCR alpha binding domain or TCR beta binding domain that targets a specific tumor antigen. In embodiments, the TCR comprises the TCRγ and TORδ chains or the TCRα and TCRβ chains. The present disclosure also describes vectors including the isolated nucleic acids described above. In embodiments, a single vector contains the isolated nucleic acid encoding the first CAR and second CAR or TCR. In embodiments, a first vector contains the first nucleic acid encoding a first CAR, a second vector contains the nucleic acid encoding the second CAR or TCR. In embodiments, the vector comprises a bispecific CAR including at least two antigen binding domains.

[0155] Moreover, the present disclosure describes cells comprising the isolated nucleic acids or vectors described above. The cells have been introduced with the isolated nucleic acids or vectors described herein and express at least two more binding domains. In embodiments, the cells include two or more different binding domains, a first antigen binding domain and a second antigen binding domain, wherein the first antigen binding domain binds a cell surface molecule of a WBC, and the second antigen binding domain binds an antigen different from the cell surface molecule of a WBC. Further, the present disclosure describes compositions including a population of the cells described herein. In embodiments, the cells are peripheral blood mononuclear cells (PBMCs) such as lymphocytes. In embodiments, the lymphocytes are T cells, NK cell, or dendritic cells.

[0156] The present disclosure also describes methods of culturing cells described above. The methods described herein includes obtaining a cell comprising a first antigen binding domain and a second antigen binding domain, wherein the first antigen binding domain binds a cell surface molecule of a WBC, and the second antigen binding domain binds an antigen different from the cell surface molecule of the WBC; and culturing the cell in the presence of an agent derived from a cell surface molecule of the WBC or from an antigen to which the second antigen binding domain binds. In embodiments, the agent is an extracellular domain of a cell surface molecule of a WBC.

[0157] The present disclose describes methods for in vitro cell preparation, wherein the method includes providing cells; introducing one or more nucleic acids encoding a first antigen binding domain and a second antigen binding domain into the cells, wherein the first antigen binding domain binds a cell surface molecule of a WBC, and the second antigen binding domain binds an antigen different from the cell surface molecule of the WBC; and culturing the cells in the presence of an agent derived from the cell surface molecule of the WBC or from an antigen to which the second antigen binding domain binds.

[0158] The present disclosure describes using the prepared cells preparation to enhance T cell expansion in a subject having cancer. In embodiments, the method comprises introducing a plurality of nucleic acids into T cells, the plurality of nucleic acids encoding a chimeric antigen receptor (CAR) binding a solid tumor antigen and encoding a CAR binding a B cell antigen, at least a portion of the T cells comprising the CAR binding the solid tumor antigen and the CAR binding the B cell antigen; and administering an effective amount of the T cells to the subject. The T cell expansion is enhanced or the number of T cells is increased in the subject as compared to a subject that is administered with T cells comprising the plurality of nucleic acids encoding only one CAR.

[0159] Additionally, the present disclosure describes methods for introducing and/or enhancing lymphocyte (T cell) response in a subject. Embodiments described herein involve a mechanism that expands lymphocytes and a mechanism that relates to binding of an antigen on a CAR to a tumor cell. In embodiments, the first mechanism involves a molecule associated with a signal that is involved in expanding the lymphocytes in a subject, and an additional mechanism involves a molecule associated with a signal directed to binding, inhibiting the growth of, or killing a tumor cell in the subject. For example, the first mechanism includes a CAR binding to an antigen associated with blood, such as blood cells and blood plasma, or non-essential tissues, and the additional mechanism includes a CAR or TCR targeting an antigen associated with the tumor cell. Examples of non-essential tissues include the mammary gland, colon, gastric gland, ovary, blood components, such WBC, and thyroid. In embodiments, the first mechanism involves a first binding domain of a molecule, and the additional mechanism involves a second domain of a molecule. In embodiments, the first mechanism and the additional mechanism are performed by the same molecule or by separate molecules. In particular embodiments, the mechanism involves a cell expressing an antigen associated with a tumor cell, and the additional mechanism involves a lymphocyte having an antigen binding domain.

[0160] The methods described herein involves lymphocytes including an expansion molecule and a function molecule. In embodiments, the expansion molecule expands the lymphocytes in a subject, and/or the function molecule inhibits the growth of or kills a tumor cell in the subject. In embodiments, the expansion molecule and the function molecule are on a single CAR molecule, for example a bispecific CAR molecule. In embodiments, the expansion molecule and the function molecule are on separate molecules, for example, CAR and TCR or two different CARs. The expansion molecule can include a CAR binding to an antigen associated with blood (e.g., blood cells and blood plasma) or non-essential tissues, and the function molecule can include a CAR or TCR targeting an antigen associated with the tumor cell.

[0161] Lymphocyte or T cell response in a subject refers to cell-mediated immunity associated with a helper, killer, regulatory, and other types of T cells. For example, T cell response may include activities such as assisting other WBCs in immunologic processes and identifying and destroying virus-infected cells and tumor cells. T cell response in the subject can be measured via various indicators such as a number of virus-infected cells and/or tumor cells that T cells kill, the amount of cytokine that T cells release in co-culturing with virus-infected cells and/or tumor cells, a level of proliferation of T cells in the subject, a phenotype change of T cells, for example, changes to memory T cells, and a level longevity or lifetime of T cells in the subject.

[0162] In embodiments, the method of enhancing T cell response comprises treating a subject in need thereof, for example, a subject diagnosed with a tumor. The term tumor refers to a mass, which can be a collection of fluid, such as blood, or a solid mass. A tumor can be malignant (cancerous) or benign. Examples of blood cancers include chronic lymphocytic leukemia, acute myeloid leukemia, acute lymphoblastic leukemia, and multiple myeloma.

[0163] Solid tumors usually do not contain cysts or liquid areas. The major types of malignant solid tumors include sarcomas and carcinomas. Sarcomas are tumors that develop in soft tissue cells called mesenchymal cells, which can be found in blood vessels, bone, fat tissues, ligament lymph vessels, nerves, cartilage, muscle, ligaments, or tendon, while carcinomas are tumors that form in epithelial cells, which are found in the skin and mucous membranes. The most common types of sarcomas include undifferentiated pleomorphic sarcoma which involves soft tissue and bone cells; leiomyosarcoma which involves smooth muscle cells that line blood vessels, gastrointestinal tract, and uterus; osteosarcoma which involves bone cells, and liposarcoma which involves fat cells. Some examples of sarcomas include Ewing sarcoma, Rhabdomyosarcoma, chondosarcoma, mesothelioma, fibrosarcoma, fibrosarcoma, and glioma.

[0164] The five most common carcinomas include adrenocarcinoma which involves organs that produce fluids or mucous, such as the breasts and prostate; basal cell carcinoma which involves cells of the outer-most layer of the skin, for example, skin cancer; squamous cell carcinoma which involves the basal cells of the skin; and transitional cell carcinoma which affects transitional cells in the urinary tract which includes the bladder, kidneys, and ureter. Examples of carcinomas include cancers of the thyroid, breast, prostate, lung, intestine, skin, pancreas, liver, kidneys, and bladder, and cholangiocarcinoma.

[0165] The methods described herein can be used to treat a subject diagnosed with cancer. The cancer can be a blood cancer or can be a solid tumor, such as a sarcoma or carcinoma. The method of treating includes administering an effective amount of T cells comprising a first antigen binding domain and a second antigen binding domain to the subject to provide a T-cell response, wherein the first antigen binding domain binds a cell surface molecule of a WBC, and the second antigen binding domain binds an antigen different from the cell surface molecule of the WBC. In embodiments, enhancing the T cell response in the subject includes selectively enhancing proliferation of T cell expressing the first antigen binding domain and the second antigen binding domain in vivo.

[0166] In embodiments, the T cells for enhancing T cell response in a subject includes administering to the subject, T cells comprising a bispecific CAR including two different binding domains or administering T cells comprising a first CAR and a second CAR, wherein the first CAR and the second CAR, each includes a different antigen binding domain.

[0167] In embodiments, methods for enhancing T cell response in a subject includes administering a T cell including a CAR molecule and a TCR molecule. The CAR molecule targets or binds a surface marker of a white blood cell, and the TCR molecule binds a marker or an antigen of the tumor that is expressed on the surface or inside the tumor cell.

[0168] The present disclosure describes methods of expanding cells expressing an antigen binding domain in vivo. The method includes administering an effective amount of T cells comprising a first antigen binding domain and a second antigen binding domain to a subject in need thereof, wherein the first antigen binding domain binds a cell surface molecule of a WBC, and the second antigen binding domain binds an antigen different from the cell surface molecule of the WBC. The methods are useful for expanding or increasing the number of T cells, NK cells, dendritic cells.

[0169] In embodiments, the first antigen binding domain is on a first chimeric antigen receptor (CAR) and the second antigen binding domain is on a second CAR or a TCR. For example, the first CAR and the second CAR or TCR include an extracellular antigen binding domain, a transmembrane domain, and a cytoplasmic domain. The cytoplasmic domain of the first CAR include a co-stimulatory domain and a CD3 zeta domain for transmitting signals for activation of cellular responses. In embodiments, the cytoplasmic domain of the first CAR includes one or more co-stimulatory domains in the absence of a CD3 zeta domain such that activation or stimulation of the first CAR expands WBCs, such as lymphocytes, without introducing and/or activating the killing function of the WBCs. In embodiments, the lymphocytes are T cells.

[0170] In embodiments, the first and second antigen binding domains are on the same CAR (the first CAR), for example, a bispecific CAR with an extracellular antigen binding domain, a transmembrane domain, and a cytoplasmic domain. The extracellular antigen binding domain includes at least two scFvs and at least one of the scFvs function as a first antigen binding domain for binding a cell surface molecule of a WBC.

[0171] In embodiments, the antigen different from the cell surface molecule of the WBC is CD19, CD22, CD20, BCMA, CD5, CD7, CD2, CD16, CD56, CD30, CD14, CD68, CD11b, CD18, CD169, CD1c, CD33, CD38, CD138, CD13, B7, CAIX, CD123, CD133, CD171, CD171/L1-CAM, CEA, Claudin 18.2, cMet, CS1, CSPG4, Dectin1, EGFR, EGFR vIII, EphA2, ERBB receptors, ErbB T4, ERBB2, FAP, Folate receptor 1, FITC, Folate receptor 1, FSH, GD2, GPC3, HA-1 H/HLA-A2, HER2, IL-11Ra, IL13 receptor a2, IL13R, IL13Rα2 (zetakine), Kappa, Leukemia, LewisY, Mesothelin, MUC1, NKG2D, NY-ESO-1, PSMA, ROR-1, TRAIL-receptor1, or VEGFR2.

[0172] In embodiments, the MUC1 is a tumor-exclusive epitope of a human MUC1, and the first CAR and the second CAR or the TCR are expressed as separate polypeptides. In embodiments, the MUC1 is a tumor form of human MUC1 (tMUC1).

[0173] In embodiments, the first CAR includes a co-stimulatory domain without a signaling domain, such as the CD3 zeta domain, and the MUC1 CAR (second CAR) comprises the MUC1 binding domain, a transmembrane domain, a co-stimulatory, and a CD3 zeta domain.

[0174] As used herein, the term “MUC1” refers to a molecule defined as follows. MUC1 is one of the epithelial mucin family of molecules. MUC1 is a transmembrane mucin glycoprotein that is normally expressed on all glandular epithelial cells of the major organs. In normal cells, MUC1 is only expressed on the apical surface and is heavily glycosylated with its core proteins sequestered by the carbohydrates. As cells transform to a malignant phenotype, expression of MUC1 increases several folds, and the expression is no longer restricted to the apical surface, but it is found all around the cell surface and in the cytoplasm. In addition, the glycosylation of tumor associated MUC1 is aberrant, with greater exposure of the peptide core than is found on MUC1 expressed in normal tissues. Little is known regarding the specifics of the aberrant glycosylation.

[0175] MUC1 is widely expressed on a large number of epithelial cancers and is aberrantly glycosylated making it structurally and antigenically distinct from that expressed by non-malignant cells (see, e.g., Barratt-Boyes, 1996; Price et al., 1998; Peterson et al., 1991). The dominant form of MUC1 is a high molecular weight molecule comprising a large highly immunogenic extracellular mucin-like domain with a large number of twenty amino acid tandem repeats, a transmembrane region, and a cytoplasmic tail (Quin et al., 2000; McGucken et al., 1995; Dong et al., 1997).

[0176] In most epithelial adenocarcinomas including breast and pancreas, MUC1 is overexpressed and aberrantly glycosylated. Adenocarcinoma of the breast and pancreas not only overexpress MUC1 but also shed MUC1 into the circulation. High MUC1 serum levels are associated with progressive disease. MUC1 has been exploited as a prospective biomarker because of the complex and heterogeneous nature of the epitopes expressed within the antigen. MUC1 synthesized by cancerous tissues (e.g., tumor associated MUC1) usually displays an aberrant oligosaccharide profile, which gives rise to the expression of neomarkers such as sialyl-Lea (assayed in the CA19-9 test), sialyl-Lex, and sialyl-Tn (TAG-72), as well as the cryptic epitopes such as Tn.

[0177] Several antibodies are being developed against MUC1 for therapeutic use. Pemtumomab (also known as HMFG1) is in Phase III clinical trials as a carrier to deliver the radioisotope Yttrium-90 into tumors in ovarian cancer (reviewed in Scott et al., 2012). CA15-3 (also the HMFG1 antibody), CA27-29, and CA19-9 are all antibodies to MUC1 that are used to assess levels of circulating MUC1 in patients with cancer. However, these antibodies have shown limited utility as therapeutic agents or as biomarkers because they cannot distinguish effectively between MUC1 expressed on normal versus transformed tumor epithelia. In other words, none of these antibodies appear to be targeted to a tumor-specific MUC1 epitope.

[0178] A new antibody that is highly specific for a tumor-specific form of MUC1 (tMUC) is designated TAB-004 and is described in U.S. Pat. No. 8,518,405 (see also Curry et al., 2013). While Pemtumomab (HMFG1) was developed using human milk fat globules as the antigen (Parham et al., 1988), TAB-004 was developed using tumors expressing an altered form of MUC1 (Tinder et al., 2008). TAB-004 recognizes the altered glycosylated epitope within the MUC1 tandem repeat sequence. This area is accessible for antigenic detection in tMUC but is blocked from antigenic detection in normal MUC1 by large branches of glycosylation (Gendler, 2001; Mukherjee et al., 2003b; Hollingsworth & Swanson, 2004; Kufe, 2009). Importantly, TAB-004 is different from the epitopes recognized by other MUC1 antibody and has unique complementary determinant regions (CDRs) of the heavy and light chains. The antibody binds the target antigen with a high binding affinity at 3 ng/ml (20 pM) and does not bind unrelated antigens (Curry et al., 2013). Thus, TAB-004 distinguishes between normal and tumor form of MUC1 while HMFG1 (Pemtumomab) does not (see U.S. Pat. No. 8,518,405).

[0179] In embodiments, the WBC is a granulocyte, monocyte and or lymphocyte. In embodiments, the WBC is a B cell.

[0180] In embodiments, the first CAR comprises the first antigen binding domain, a transmembrane domain, a co-stimulatory domain, and a CD3 zeta domain and/or the second CAR comprises the second antigen binding domain, a transmembrane domain, a co-stimulatory domain, and a CD3 zeta domain.

[0181] In embodiments, the antigen binding domain is a Fab or a scFv. In embodiments, the first CAR comprises the amino acid sequence of one of SEQ ID NO: 5, 6, and 53-58; and the second CAR comprises the amino acid sequence of one of SEQ ID NOs: 5-17, 29, 33, 37, 71, and 72, or the amino acid sequence encoded by the nucleic acid sequence of one of SEQ ID Nos: 41, 45, 63, 67, and 68. In embodiments, a nucleic acid sequence encoding the first CAR comprises the nucleic acid sequence of SEQ ID NO: 59 or 60, and a nucleic acid sequence encoding the second CAR comprises the nucleic acid sequence of SEQ ID NO: 61. In embodiments, the isolated nucleic acid comprises one of the nucleic acid sequence of SEQ ID NO: 62-69. In embodiments, the first CAR and the second CAR are expressed as separate polypeptides.

[0182] In embodiments, the first antigen binding domain is on a CAR and the second antigen binding domain is on a T Cell Receptor (TCR). In embodiments, the TCR is a modified TCR. In embodiments, the TCR is derived from spontaneously occurring tumor-specific T cells in patients. In embodiments, the TCR binds a tumor antigen. In embodiments, the tumor antigen comprises CEA, gp100, MART-1, p53, MAGE-A3, or NY-ESO-1.

[0183] In embodiments, a T cell clone that expresses a TCR with high affinity for the target antigen may be isolated. Tumor-infiltrating lymphocytes (TILs) or peripheral blood mononuclear cells (PBMCs) can be cultured in the presence of antigen-presenting cells (APCs) pulsed with a peptide representing an epitope known to elicit a dominant T cell response when presented in the context of a defined HLA allele. High-affinity clones may be then selected on the basis of MHC-peptide tetramer staining and/or the ability to recognize and lyse target cells pulsed with low titrated concentrations of cognate peptide antigen. After the clone has been selected, the TCRα and TCRβ chains or TCRγ and TORO chains are identified and isolated by molecular cloning. For example, for TCRα and TCRβ chains, the TCRα and TCRβ gene sequences are then used to generate an expression construct that ideally promotes stable, high-level expression of both TCR chains in human T cells. The transduction vehicle, for example, a gammaretrovirus or lentivirus, can then be generated and tested for functionality (antigen specificity and functional avidity) and used to produce a clinical lot of the vector. An aliquot of the final product can then be used to transduce the target T cell population (generally purified from patient PBMCs), which is expanded before infusion into the patient.

[0184] Various methods may be implemented to obtain genes encoding tumor-reactive TCR. More information is provided in Kershaw et al., Clin Transl Immunology. 2014 May; 3(5): e16. In embodiments, specific TCR can be derived from spontaneously occurring tumor-specific T cells in patients. Antigens included in this category include the melanocyte differentiation antigens MART-1 and gp100, as well as the MAGE antigens and NY-ESO-1, with expression in a broader range of cancers. TCRs specific for viral-associated malignancies can also be isolated, as long as viral proteins are expressed by transformed cells. Malignancies in this category include liver and cervical cancer, associated with hepatitis and papilloma viruses, and Epstein-Barr virus-associated malignancies. In embodiments, target antigens of the TCR may include CEA (e.g., for colorectal cancer), gp100, MART-1, p53 (e.g., for Melanoma), MAGE-A3 (e.g., Melanoma, esophageal and synovial sarcoma), NY-ESO-1 (e.g., for Melanoma and sarcoma as well as Multiple myelomas).

[0185] In embodiments, a binding domain of the first CAR binds CD19, and a binding domain of the second CAR binds tumor associated MUC1. In embodiments, the binding domain of the second CAR comprises: (i) a heavy chain complementary determining region 1 comprising the amino acid sequence of SEQ ID: 76 or 85, a heavy chain complementary determining region 2 comprising the amino acid sequence of SEQ ID: 77 or 86, and a heavy chain complementary determining region 3 comprising the amino acid sequence of SEQ ID: 78 or 87; and (ii) a light chain complementary determining region 1 comprising the amino acid sequence of SEQ ID: 73 or 82, a light chain complementary determining region 2 comprising the amino acid sequence of TRP-ALA-SER (WAS) or SEQ ID: 83, and a light chain complementary determining region 3 comprising the amino acid sequence of SEQ ID: 75 or 84.

[0186] In embodiments, the binding domain of the second CAR comprises: (i) a heavy chain complementary determining region 1 comprising the amino acid sequence of SEQ ID: 76, a heavy chain complementary determining region 2 comprising the amino acid sequence of SEQ ID: 77, and a heavy chain complementary determining region 3 comprising the amino acid sequence of SEQ ID: 78; and (ii) a light chain complementary determining region 1 comprising the amino acid sequence of SEQ ID: 73, a light chain complementary determining region 2 comprising the amino acid sequence of TRP-ALA-SER (WAS), and a light chain complementary determining region 3 comprising the amino acid sequence of SEQ ID: 75.

[0187] In embodiments, the binding domain of the second CAR comprises: (i) a heavy chain complementary determining region 1 comprising the amino acid sequence of SEQ ID: 85, a heavy chain complementary determining region 2 comprising the amino acid sequence of SEQ ID: 86, and a heavy chain complementary determining region 3 comprising the amino acid sequence of SEQ ID: 87; and (ii) a light chain complementary determining region 1 comprising the amino acid sequence of SEQ ID: 82, a light chain complementary determining region 2 comprising the amino acid sequence of SEQ ID: 83, and a light chain complementary determining region 3 comprising the amino acid sequence of SEQ ID: 84. In embodiments, the binding domain of the first CAR comprises the amino acid sequence of SEQ ID: 5 or 6. In embodiments, the binding domain of the second CAR comprises one of the amino acid sequences of SEQ ID: 70 -72 and 79-81.

[0188] In embodiments, the first CAR comprises the first antigen binding domain, a transmembrane domain, a co-stimulatory domain, and a CD3 zeta domain and/or the second CAR comprises the second antigen binding domain, a transmembrane domain, a co-stimulatory domain, and a CD3 zeta domain.

[0189] In embodiments, the first CAR and the second CAR are expressed as separate polypeptides.

[0190] In embodiments, the cytoplasmic domain or the transmembrane domain of the second CAR is modified such that the second CAR is capable of activating the modified T cell via cells expressing CD19 without damaging the cells expressing CD19.

[0191] Embodiments described herein relate to a bispecific chimeric antigen receptor, comprising: a first antigen binding domain, a second antigen binding domain, a cytoplasmic domain, and transmembrane domain, wherein the first antigen binding domain recognizes a first antigen, and the second antigen binding domain recognizes a second antigen, the first antigen is different from the second antigen.

[0192] In embodiments, the first antigen and the second antigen do not express on the same cell. In embodiments, the first antigen is an antigen of a blood component, and the second antigen is an antigen of a solid tumor.

[0193] Blood cells refer to red blood cells (RBCs), white blood cells (WBCs), platelets, or other blood cells. For example, RBCs are blood cells of delivering oxygen (O₂) to the body tissues via the blood flow through the circulatory system. Platelets are cells that are involved in hemostasis, leading to the formation of blood clots. WBCs are cells of the immune system involved in defending the body against both infectious disease and foreign materials. There are a number of different types and sub-types of WBCs and each has a different role to play. For example, granulocytes, monocytes, and lymphocytes are 3 major types of white blood cell. There are three different forms of granulocytes: Neutrophils, Eosinophils, Basophils.

[0194] A cell surface molecule of a WBC refers to a molecule expressed on the surface of the WBC. For example, the cell surface molecule of a lymphocyte may include CD19, CD22, CD20, BCMA, CD5, CD7, CD2, CD16, CD56, and CD30. The cell surface molecule of a B cell may include CD19, CD20, CD22, BCMA. The cell surface molecule of a monocyte may include CD14, CD68, CD11b, CD18, CD169, and CD1c. The cell surface molecule of granulocyte may include CD33, CD38, CD138, and CD13.

[0195] In embodiments, the first antigen is CD19, and the second antigen is a tumor associated MUC1. In embodiments, the first antigen binding domain comprises one of the amino acid sequences of SEQ ID: 5 and 6. In embodiments, the second antigen binding domain comprises one of the amino acid sequence of SEQ ID: 70 -72 and 79-81.

[0196] In embodiments, the present disclosure describes a method of enhancing T cell response in a subject or treating a tumor of the subject, the method comprising: administering an effective amount of modified T cell to the subject to provide a T cell response such that the CART cell is expanded in the blood of the subject via cells expressing CD19.

[0197] In embodiments, the tumor associated MUC1 is expressed on tumor cells, but not on corresponding non-malignant cells. In embodiments, a scFv against the tumor associated MUC1 directly interacts with an o-glycosylated GSTA motif (SEQ ID NO. 88).

[0198] Embodiments described herein relate to a cell comprising the bispecific CAR and to an isolated nucleic acid encoding the bispecific CAR.

[0199] In embodiments, the present disclosure describes a method of in vivo cell expansion. In embodiments, the method may include administering an effective amount of T cell comprising a CAR to the subject to provide a T cell response; and administering an effective amount of presenting cells (e.g., T cells) expressing a soluble agent that an extracellular domain of the CAR recognizes. In embodiments, the method may be implemented to enhance T cell response in a subject. The method may include administering an effective amount of T cell comprising a CAR to the subject to provide a T cell response and administering an effective amount of presenting cells expressing a soluble agent that an extracellular domain of the CAR recognizes to enhance the T cell response in the subject. In certain embodiments, the presenting cells are T cells, dendritic cells, and/or antigen presenting cells. In certain embodiments, the enhancing T cell response in the subject may include selectively enhancing proliferation of T cell comprising the CAR. In embodiments, the method may be used to enhance treatment of a condition on a subject using CAR T cells. The method may include administering a population of cells that express an agent or administering an agent that is formulated as a vaccine. In these instances, the CAR T cells include a nucleic acid that encodes a CAR, and an extracellular domain of the CAR recognize the agent. In embodiments, the method may be implemented to enhance proliferation of CAR T cells in a subject having a disease. The method may include preparing CAR T cells comprising a CAR; administering an effective amount of the CAR T cells to the subject; introducing, into cells, a nucleic acid encoding an agent that an extracellular domain of the CAR recognizes; and administering an effective amount of the cells (introduced with the nucleic acid encoding the agent) to the subject. In embodiments, the T cell expansion or increased in the number of T cells may be measured based on an increase in copy number of CAR molecules in genomic DNA of the T cells. In embodiments, the T cell expansion or increased in the number of T cells may be measured based on flow cytometry analysis on molecules expressed on the T cells.

[0200] Embodiments described herein relate to an isolated T cell comprising a first CAR, and a second CAR, wherein an antigen binding domain of the first CAR binds an antigen such as CD19, CD33, CD14, and BCMA, and an antigen binding domain of the second CAR binds a tumor associated MUC. In embodiments, the tumor associated MUC is MUC1 or MUC2. Embodiments described herein relate to a composition comprising a population of the isolated T cells and to a method of enhancing T cell response in a subject or treating a tumor of the subject, the method comprising: administering an effective amount of the isolated T cell.

[0201] In embodiments, the first CAR comprises the amino acid sequence of SEQ ID NO: 207, and the second CAR comprises the amino acid sequence of SEQ ID: 202. In embodiments, the first CAR comprises the amino acid sequence of SEQ ID NO: 203, 207, 216, or 219, and the second CAR comprises the amino acid sequence of SEQ ID: 202 or 205. In embodiments, the antigen binding domain of the second CAR comprises the amino acid sequence of SEQ ID NO: 70. In embodiments, the antigen binding domain of the second CAR comprises the amino acid sequence of SEQ ID NO: 5 or 6. In embodiments, the isolated T cell comprises a nucleic acid sequence of SEQ ID NO: 201, 204, 206, 208, 215, 217, 218, or 220. In embodiments, each of the first CAR and the second CAR comprises an antigen binding domain, a transmembrane domain, and a cytoplasmic domain.

[0202] In embodiments, the cytoplasmic domain comprises a co-stimulatory domain and a CD3 zeta domain.

[0203] In embodiments, the isolated T cell comprises a dominant negative variant of a receptor of programmed death 1 (PD-1), cytotoxic T lymphocyte antigen-4 (CTLA-4), B- and T-lymphocyte attenuator (BTLA), T cell immunoglobulin mucin-3 (TIM-3), lymphocyte-activation protein 3 (LAG-3), T cell immunoreceptor with Ig and ITIM domains (TIGIT), leukocyte-associated immunoglobulin-like receptor 1 (LAIRI), natural killer cell receptor 2B4 (2B4), or CD 160. In embodiments, the isolated T cell comprises a reduced amount of TCR, as compared to the corresponding wide-type T cell. Dominant negative mutations have an altered gene product that acts antagonistically to the wild-type allele. These mutations usually result in an altered molecular function (often inactive) and are characterized by a dominant or semi-dominant phenotype.

[0204] The present disclosure describes pharmaceutical compositions. The pharmaceutical compositions include one or more of the following: CAR molecules, TCR molecules, modified CAR T cells, modified cells comprising CAR or TCR, modified cells, nucleic acids, and vectors described above. Pharmaceutical compositions are administered in a manner appropriate to the disease to be treated (or prevented). The quantity and frequency of administration will be determined by such factors as the condition of the patient, and the type and severity of the patient's disease, although appropriate dosages may be determined by clinical trials.

[0205] When “an immunologically effective amount”, “an anti-tumor effective amount”, “a tumor-inhibiting effective amount”, or “therapeutic amount” is indicated, the precise amount of the compositions of the present disclosure to be administered can be determined by a physician with consideration of individual differences in age, weight, tumor size, extent of infection or metastasis, and condition of the patient (subject). It can be stated that a pharmaceutical composition comprising the T cells described herein may be administered at a dosage of 10⁴ to 10⁹ cells/kg body weight, preferably 10⁵ to10⁶ cells/kg body weight, including all integer values within those ranges. T cell compositions may also be administered multiple times at these dosages. The cells can be administered by using infusion techniques that are commonly known in immunotherapy (see, e.g., Rosenberg et al., New Eng. J. of Med. 319:1676, 1988). The optimal dosage and treatment regime for a particular patient can readily be determined by one skilled in the art of medicine by monitoring the patient for signs of disease and adjusting the treatment accordingly. In certain embodiments, it may be desired to administer activated T cells to a subject and then subsequently redraw the blood (or have apheresis performed), collect the activated and expanded T cells, and reinfuse the patient with these activated and expanded T cells. This process can be carried out multiple times every few weeks. In certain embodiments, T cells can be activated from blood draws of from 10 cc to 400 cc. In certain embodiments, T cells are activated from blood draws of 20 cc, 30 cc, 40 cc, 50 cc, 60 cc, 70 cc, 80 cc, 90 cc, or 100 cc. Not to be bound by theory, using this multiple blood draw/multiple reinfusion protocols, may select out certain populations of T cells.

[0206] The administration of the pharmaceutical compositions described herein may be carried out in any convenient manner, including by aerosol inhalation, injection, ingestion, transfusion, implantation, or transplantation. The compositions described herein may be administered to a patient subcutaneously, intradermally, intratumorally, intranodally, intramedullary, intramuscularly, by intravenous (i. v.) injection, or intraperitoneally. In embodiments, the T cell compositions described herein are administered to subjects by intradermal or subcutaneous injection. In embodiments, the T cell compositions of the present disclosure are administered by i.v. injection. The compositions of T cells may be injected directly into a tumor, lymph node, or site of infection. In embodiments, cells activated and expanded using the methods described herein, or other methods known in the art where T cells are expanded to therapeutic levels, are administered to patients in conjunction with (e.g., before, simultaneously or following) any number of relevant treatment modalities, including but not limited to treatment with agents for antiviral therapy, cidofovir and interleukin-2, Cytarabine (also known as ARA-C); or natalizumab treatment for MS patients; or efalizumab treatment for psoriasis patients or other treatments for PML patients. In further embodiments, the T cells described herein can be used in combination with chemotherapy, radiation, immunosuppressive agents, such as cyclosporin, azathioprine, methotrexate, mycophenolate, and FK506, antibodies, or other immunoablative agents such as CAM PATH, anti-CD3 antibodies or other antibody therapies, cytoxin, fludaribine, cyclosporin, FK506, rapamycin, mycophenolic acid, steroids, FR901228, cytokines, and irradiation. These drugs inhibit either the calcium dependent phosphatase calcineurin (cyclosporine and FK506) or inhibit the p70S6 kinase that is important for growth factor induced signaling (rapamycin). (Liu et al., Cell 66:807-815, 1991; Henderson et al., Immun 73:316-321, 1991; Bierer et al., Curr. Opin. Immun 5:763-773, 1993; Isoniemi (supra)). In embodiments, the cell compositions described herein are administered to a subject in conjunction with (e.g., before, simultaneously or following) bone marrow transplantation, T cell ablative therapy using either chemotherapy agents such as, fludarabine, external-beam radiation therapy (XRT), cyclophosphamide, or antibodies such as OKT3 or CAMPATH. In embodiments, the cell compositions described herein are administered following B-cell ablative therapy. For example, agents that react with CD20, e.g., Rituxan may be administered to patients. In embodiments, subjects may undergo standard treatment with high dose chemotherapy followed by peripheral blood stem cell transplantation. In certain embodiments, following the transplant, subjects receive an infusion of the expanded immune cells of the present disclosure. In embodiments, expanded cells are administered before or following surgery.

[0207] The dosage of the above treatments to be administered to a subject in need thereof will vary with the precise nature of the condition being treated and the recipient of the treatment. The scaling of dosages for human administration can be performed according to art-accepted practices by a physician depending on various factors.

[0208] Additional information on the methods of cancer treatment using engineered or modified T cells is provided in U.S. Pat. No. 8,906,682, incorporated by reference in its entirety.

[0209] Embodiments described herein relate to an in vitro method for preparing modified cells. The method may include obtaining a sample of cells from a subject. For example, the sample may include T cells or T cell progenitors. The method may further include transfecting the sample of cells with a DNA encoding at least a CAR and culturing the population of CAR cells ex vivo in a medium that selectively enhances proliferation of CAR-expressing T cells.

[0210] In embodiments, the sample is a cryopreserved sample. In embodiments, the sample of cells is from umbilical cord blood or a peripheral blood sample from the subject. In embodiments, the sample of cells is obtained by apheresis or venipuncture. In embodiments, the sample of cells is a subpopulation of T cells.

### Tables 2-4

TABLE 2

| | SEQ | | SEQ | | SEQ |
|---|---|---|---|---|---|
| | ID | | ID | | ID |
| Name | NO: | Name | NO: | Name | NO: |
| SP | 1 | UPK2 | 101 | Construct of MUC1- | 201 |
| | | 5E5-A-IRES-CD19-A | | | |
| Hinge & | 2 | ADAM12 | 102 | CAR 1 of MUC1-5E5- | 202 |
| transmembrane | | A-IRES-CD19-A | | | |
| domain | | | | | |
| Co-stimulatory | 3 | 5LC45A3 | 103 | CAR 2 of MUC1-5E5- | 203 |
| domain | | | | A-IRES-CD19-A | |
| CD3-zeta | 4 | ACPP | 104 | Construct of MUC1- | 204 |
| | | | | 5E5-B-IRES-CD19-A | |
| scFV Humanized | 5 | MUC21 | 105 | CAR 1 of MUC1-5E5- | 205 |
| CD19 | | | | B-IRES-CD19-A | |
| scFV CD19 | 6 | MUC16 | 106 | CAR 2 of MUC1-5E5- | 203 |
| | | | | B-IRES-CD19-A | |
| scFv FZD10 | 7 | M54A12 | 107 | Construct of MUC1- | 206 |
| | | | | 5E5-A-IRES-CD19-B | |
| scFv TSHR | 8 | ALPP | 108 | CAR 1 of MUC1-5E5- | 202 |
| | | | | A-IRES-CD19-B | |
| scFv PRLR | 9 | SLC2A14 | 109 | CAR 2 of MUC1-5E5- | 207 |
| | | | | A-IRES-CD19-B | |
| scFv Muc 17 | 10 | GS1-259H13.2 | 110 | Construct of MUC1- | 208 |
| | | | | 5E5-B-IRES-CD19-B | |
| scFv GUCY2C | 11 | ERVFRD-1 | 111 | CAR 1 of MUC1-5E5- | 205 |
| | | | | B-IRES-CD19-B | |
| scFv CD207 | 12 | ADGRG2 | 112 | CAR 2 of MUC1-5E5- | 207 |
| | | | | B-IRES-CD19-B | |
| Prolactin (ligand) | 13 | ECEL1 | 113 | Construct of MUC1-2- | 209 |
| | | | | A-IRES-CD19-A | |
| scFv CD3 | 14 | CHRNA2 | 114 | CAR 1 of MUC1-2-A- | 210 |
| | | | | IRES-CD19-A | |
| scFv CD4 | 15 | GP2 | 115 | CAR 2 of MUC1-2-A- | 203 |
| | | | | IRES-CD19-A | |
| scFv CD4-2 | 16 | PSG9 | 116 | Construct of MUC1-2- | 211 |
| | | | | B-IRES-CD19-A | |
| scFv CD5 | 17 | SIGLEC15 | 117 | CAR 1 of MUC1-2-B- | 212 |
| | | | | IRES-CD19-A | |
| CD19 antigen | 18 | SLC6A3 | 118 | CAR 2 of MUC1-2-B- | 203 |
| | | | | IRES-CD19-A | |
| FZD10 antigen | 19 | KISS1R | 119 | Construct of MUC1-2- | 213 |
| | | | | A-IRES-CD19-B | |
| TSHR antigen | 20 | QRFPR | 120 | CAR 1 of MUC1-2-A- | 210 |
| | | | | IRES-CD19-B | |
| PRLR antigen | 21 | GPR119 | 121 | CAR 2 of MUC1-2-A- | 207 |
| | | | | IRES-CD19-B | |
| Muc 17 antigen | 22 | CLDN6 | 122 | Construct of MUC1-2- | 214 |
| | | | | B-IRES-CD19-B | |
| GUCY2C antigen | 23 | SP-2 | 123 | CAR 1 of MUC1-2-B- | 212 |
| | | | | IRES-CD19-B | |
| CD207 antigen | 24 | Linker-2 | 124 | CAR 2 of MUC1-2-B- | 207 |
| | | | | IRES-CD19-B | |
| CD3 antigen | 25 | Hinge-2 | 125 | Construct of MUC1- | 215 |
| | | | | 5E5-A-IRES-hCD19-A | |
| CD4 antigen | 26 | TM-2 | 126 | CAR 1 of MUC1-5E5- | 202 |
| | | | | A-IRES-hCD19-A | |
| CD5 antigen | 27 | 4-1BB-2 | 127 | CAR 2 of MUC1-5E5- | 216 |
| | | | | A-IRES-hCD19-A | |
| CAR CD19 nucleic | 28 | CD3 zeta-2 | 128 | Construct of MUC1- | 217 |
| acid | | | | 5E5-B-IRES-hCD19-A | |
| Hinge & TM | 29 | CLDN6-CAR-1 | 129 | CAR 1 of MUC1-5E5- | 205 |
| domain B | | | | B-IRES-hCD19-A | |
| Hinge & TM | 30 | ScFv CLDN6-CAR-1 | 130 | CAR 2 of MUC1-5E5- | 216 |
| domain A | | | | B-IRES-hCD19-A | |
| Hinge & TM | 31 | ScFv VL CLDN6- | 131 | Construct of MUC1- | 218 |
| domain D | | CAR-1 | | 5E5-A-IRES-hCD19-B | |
| Hinge & TM | 32 | ScFv VH CLDN6- | 132 | CAR 1 of MUC1-5E5- | 202 |
| domain C | | CAR-1 | | A-IRES-hCD19-B | |
| Hinge domain D | 33 | CLDN6-CAR-2 | 133 | CAR 2 of MUC1-5E5- | 219 |
| | | | | A-IRES-hCD19-B | |
| Hinge domain C | 34 | ScFv CLDN6-CAR-2 | 134 | Construct of MUC1- | 220 |
| | | | | 5E5-B-IRES-hCD19-B | |
| Hinge domain B | 35 | ScFv VL CLDN6- | 135 | CAR 1 of MUC1-5E5- | 205 |
| | | CAR-2 | | B-IRES-hCD19-B | |
| Hinge domain A | 36 | ScFv VH CLDN6- | 136 | CAR 2 of MUC1-5E5- | 219 |
| | | CAR-2 | | B-IRES-hCD19-B | |
| TM domain D | 37 | CLDN6-CAR-3 | 137 | Construct of MUC1-2- | 221 |
| | | | | A-IRES-hCD19-A | |
| TM domain A | 38 | scFv CLDN6-CAR-3 | 138 | CAR 1 of MUC1-2-A- | 210 |
| | | | | IRES-hCD19-A | |
| CD19 extracellular | 39 | scFv VL CLDN6-CAR- | 139 | CAR 2 of MUC1-2-A- | 216 |
| domain | | 3 | | IRES-hCD19-A | |
| TM domain C or B | 40 | scFv VH CLDN6- | 140 | Construct of MUC1-2- | 222 |
| | | CAR-3 | | B-IRES-hCD19-A | |
| VVTCD3zeta | 41 | CLDN6-CAR-4 | 141 | CAR 2CAR 1 of | 212 |
| | | | | MUC1-2-B-IRES- | |
| | | | | hCD19-A | |
| WTCD3zeta- | 42 | scFv CLDN6-CAR-4 | 142 | Construct of MUC1-2- | 216 |
| BCMACAR full | | | | B-IRES-hCD19-A | |
| length | | | | | |
| BCMA | 43 | scFv VL CLDN6-CAR- | 143 | Construct of MUC1-2- | 223 |
| | | 4 | | A-IRES-hCD19-B | |
| BCMA CAR vector | 44 | scFv VH CLDN6- | 144 | CAR 1 of MUC1-2-A- | 210 |
| | | CAR-4 | | IRES-hCD19-B | |
| BCMA CAR vector | 45 | SIGLEC-15-CAR-1 | 145 | CAR 2 of MUC1-2-A- | 219 |
| | | | | IRES-hCD19-B | |
| VL anti-CD5 | 46 | scFv SIGLEC-15- | 146 | Construct of MUC1-2- | 224 |
| | | CAR-1 | | B-IRES-hCD19-B | |
| VH anti-CD5 | 47 | scFv VL SIGLEC-15- | 147 | CAR 1 of MUC1-2-B- | 212 |
| | | CAR-1 | | IRES-hCD19-B | |
| VL anti-CD4 | 48 | scFv VH SIGLEC-15- | 148 | CAR 2 of MUC1-2-B- | 219 |
| | | CAR-1 | | IRES-hCD19-B | |
| VH anti-CD4 | 49 | VL1 VH1 SIGLEC-15- | 149 | Construct of MUC1- | 225 |
| | | CAR-2 | | 5E5-A-IRES-CD22-A | |
| VL anti-CD3 | 50 | VL1 VH2 SIGLEC-15- | 150 | CAR 1 of MUC1-5E5- | 202 |
| | | CAR-3 | | A-IRES-CD22-A | |
| VH anti-CD3 | 51 | VL1 VH3 SIGLEC-15- | 151 | CAR 2 of MUC1-5E5- | 226 |
| | | CAR-4 | | A-IRES-CD22-A | |
| TSHR | 52 | VL1 VH 4 SIGLEC-15- | 152 | Construct of MUC1- | 227 |
| extracellular | | CAR-5 | | 5E5-B-IRES-CD22-A | |
| domain | | | | | |
| VH region of | 53 | VL2 VH1 SIGLEC-15- | 153 | CAR 1 of MUC1-5E5- | 205 |
| BCMA scFv | | CAR-6 | | A-I RES-CD22-A | |
| VL region of | 54 | VL2 VH2 SIGLEC-15- | 154 | CAR 2 of MUC1-5E5- | 226 |
| BCMA scFv | | CAR-7 | | A-I RES-CD22-A | |
| VH region of | 55 | VL2 VH3 SIGLEC-15- | 155 | Construct of MUC1- | 228 |
| CD14 scFv | | CAR-8 | | 5E5-A-IRES-CD22-B | |
| VL region of CD14 | 56 | VL2 VH4 SIGLEC-15- | 156 | MUC1-5E5-A-IRES- | 202 |
| scFv | | CAR-9 | | CD22-B CAR 1 | |
| VH region of | 57 | VL1 SIGLEC-15-CAR | 157 | MUC1-5E5-A-IRES- | 229 |
| CD33 scFv | | CD22-B | | CAR 2 | |
| VL region of CD33 | 58 | VL2 SIGLEC-15-CAR | 158 | MUC1-5E5-B-IRES- | 230 |
| scFv | | | | CD22-B | |
| CD22CAR | 59 | VH1 SIGLEC-15-CAR | 159 | CAR 1 of MUC1-5E5- | 205 |
| | | | | B-IRES-CD22-B | |
| BCMACAR | 60 | VH2 SIGLEC-15-CAR | 160 | CAR 2 of MUC1-5E5- | 229 |
| | | | | B-IRES-CD22-B | |
| MUC1CAR | 61 | VH3 SIGLEC-15-CAR | 161 | Construct of MUC1-2- | 231 |
| | | | | A-IRES-CD22-A | |
| m19CAR-IRES- | 62 | VH4 SIGLEC-15-CAR | 162 | CAR 1 of MUC1-2-A- | 210 |
| MUC1CAR | | | | IRES-CD22-A | |
| hCD19CAR-IRES- | 63 | MUC16-CAR-1 | 163 | CAR 2 of MUC1-2-A- | 226 |
| MUC1CAR | | | | IRES-CD22-A | |
| hCD22CAR-IRES- | 64 | scFv MUC16-CAR-1 | 164 | MUC1-2-B-IRES- | 232 |
| MUC1CAR | | | | CD22-A | |
| BCMACAR-IRES- | 65 | scFv VL MUC16- | 165 | MUC1-2-B-IRES- | 212 |
| MUC1CAR | | CAR-1 | | CD22-A CAR 1 | |
| mCD19CAR-2A- | 66 | scFv VH MUC16- | 166 | MUC1-2-B-IRES- | 226 |
| MUC1CAR | | CAR-1 | | CD22-A CAR 2 | |
| hCD19CAR-2A- | 67 | MUC16-CAR-2 | 167 | MUC1-2-A-IRES- | 233 |
| MUC1CAR | | | | CD22-B | |
| hCD22CAR-2A- | 68 | scFy MUC16-CAR-2 | 168 | MUC1-2-A-IRES- | 210 |
| MUC1CAR | | | | CD22-B CAR 1 | |
| BCMA-2A- | 69 | scFy VL MUC16- | 169 | MUC1-2-A-IRES- | 229 |
| MUC1CAR | | CAR-2 | | CD22-B CAR 2 | |
| Tumor associated | 70 | scFy VH MUC16- | 170 | Construct of MUC1-2- | 234 |
| MUC1 scFv 1 | | CAR-2 | | B-IRES-CD22-B | |
| Tumor associated | 71 | KISS1R-CAR | 171 | CAR 1 of MUC1-2-B- | 212 |
| MUC1 scFv-1 VH | | | | IRES-CD22-B | |
| Tumor associated | 72 | Ligent peptide | 172 | CAR 2 of MUC1-2-B- | 229 |
| MUC1 scFv-1 VL | | KISS1R-CAR | | IRES-CD22-B | |
| Tumor associated | 73 | ZFLm1 (left) RS aa | 173 | Construct of MUC1- | 235 |
| MUC1 scFv-1 VL | | | | 5E5-A-IRES-CD14-A | |
| CDR 1 | | | | | |
| L2D8-2 (hCAR | 74 | ZFLm1 (left) F1 | 174 | CAR 1 of MUC1-5E5- | 202 |
| VL) | | | | A-IRES-CD14-A | |
| Tumor associated | 75 | ZFLm1 (left) F2 | 174 | CAR 2 of MUC1-5E5- | 236 |
| MUC1 scFv-1 VL | | | | A-IRES-CD14-A | |
| CDR 3 | | | | | |
| Tumor associated | 76 | ZFLm1 (left) F3 | 176 | Construct of MUC1- | 237 |
| MUC1 scFv-1 VH | | | | 5E5-B-IRES-CD14-A | |
| CDR 1 | | | | | |
| Tumor associated | 77 | ZFLm1 (left) F4 | 177 | CAR 1 of MUC1-5E5- | 205 |
| MUC1 scFv-1 VH | | | | B-IRES-CD14-A | |
| CDR 2 | | | | | |
| Tumor associated | 78 | ZFLm1 (left) F5 | 178 | CAR 2 of MUC1-5E5- | 236 |
| MUC1 scFv-1 VH | | | | B-IRES-CD14-A | |
| CDR 3 | | | | | |
| Tumor associated | 79 | ZFLm1 (left) F6 | 179 | Construct of MUC1- | 238 |
| MUC1 scFy 2 | | | | 5E5-A-IRES-CD14-B | |
| Tumor associated | 80 | ZFRm1-4 (right) RS | 180 | CAR 1 of MUC1-5E5- | 202 |
| MUC1 scFv2 VH | | aa | | A-IRES-CD14-B | |
| Tumor associated | 81 | ZFRm1-4 (right) F1 | 181 | CAR 2 of MUC1-5E5- | 239 |
| MUC1 scFv2 VL | | | | A-IRES-CD14-B | |
| Tumor associated | 82 | ZFRm1-4 (right) F2 | 182 | Construct of MUC1-2- | 240 |
| MUC1 scFv-2 VL | | | | A-IRES-CD14-A | |
| CDR 1 | | | | | |
| Tumor associated | 83 | ZFRm1-4 (right) F3 | 184 | CAR 1 of MUC1-2-A- | 210 |
| MUC1 scFv-2 VL | | | | IRES-CD14-A | |
| CDR 2 | | | | | |
| Tumor associated | 84 | ZFRm1-4 (right) F4 | 184 | CAR 2 of MUC1-2-A- | 236 |
| MUC1 scFv-2 VL | | | | IRES-CD14-A | |
| CDR 3 | | | | | |
| ‘Tumor associated | 85 | 6 chain-1 of | 185 | Construct of MUC1-2- | 241 |
| MUC1 scFv-2VH | | Vγ9Vδ2 | | B-IRES-CD14-A | |
| CDR 1 | | | | | |
| Tumor associated | 86 | γ chain-2 of Vγ9Vδ2 | 186 | CAR 1 of MUC1-2-B- | 212 |
| MUC1 scFv-2 VH | | | | IRES-CD14-A | |
| CDR 2 | | | | | |
| Tumor associated | 87 | δ chain-2 of Vγ9Vδ2 | 187 | CAR 2 of MUC1-2-B- | 236 |
| MUC1 scFv-2 VH | | | | IRES-CD14-A | |
| CDR 3 | | | | | |
| GSTA motif | 88 | Vγ9Vδ2 TCR-1 : DG. | 188 | Construct of MUC1-2- | 242 |
| | | SF13 | | A-IRES-CD14-B | |
| | | γ chain | | | |
| Modified PD-1 | 89 | Vγ9Vδ2 TCR-1 : DG. | 189 | CAR 1 of MUC1-2-A- | 210 |
| intracellular | | SF13 δ chain | | IRES-CD14-B | |
| domain -1 | | | | | |
| Modified PD-1 | 90 | Vγ9Vδ2 TCR-2: DG. | 190 | CAR 2 of MUC1-2-A- | 239 |
| intracellular | | SF68: | | IRES-CD14-B | |
| domain -2 | | γ chain | | | |
| Modified PD-1 | 91 | Vγ9Vδ2 TCR-2 : DG. | 191 | Construct of MUC1-2- | 243 |
| intracellular | | SF68: | | B-IRES-CD14-B | |
| domain -3 | | δ chain | | | |
| Modified PD-1 | 92 | Vγ9Vδ2 TCR-3: | 192 | CAR 1 of MUC1-2-B- | 212 |
| intracellular | | 12G12: | | IRES-CD14-B | |
| domain -4 | | γ chain | | | |
| Modified PD-1 | 93 | Vγ9Vδ2 TCR-3: | 193 | CAR 2 of MUC1-2-B- | 239 |
| intracellular | | 12G12: | | IRES-CD14-B | |
| domain -5 | | δ chain | | | |
| Removed PD-1 | 94 | Vγ9Vδ2 TCR-4: | 194 | Construct of MUC1- | 244 |
| intracellular | | CP.1.15 | | 5E5-A-IRES-BCMA-A | |
| domain -1 | | γ chain | | | |
| Removed PD-1 | 95 | TCR-4: CP.1.156 | 195 | CAR 1 of MUC1-5E5- | 202 |
| intracellular | | chain | | A-IRES-BCMA-A | |
| domain -2 | | | | | |
| Fokl WC | 96 | VVT CD3-zeta | 196 | CAR 2 of MUC1-5E5- | 245 |
| | | | | A-IRES-BCMA-A | |
| M Fokl | 97 | Invariant sequence for | 197 | Construct of MUC1- | 246 |
| | | iNKT α chain (hVα24- | | 5E5-B-IRES-BCMA-A | |
| | | JαQ-TRAC) | | | |
| M Fokl | 98 | An example for iNKT | 198 | CAR 1 of MUC1-5E5- | 205 |
| | | β chain sequence | | B-IRES-BCMA-A | |
| | | (containing Vβ11): | | | |
| γ chain-1 of | 99 | Invariant sequence for | 199 | CAR 2 of MUC1-5E5- | 245 |
| Vγ9Vδ2 | | MAIT α chain | | B-IRES-BCMA-A | |
| | | (hAV7S2-AJ33 α | | | |
| | | chain) (version1) | | | |
| VL anti-CD4-2 | 100 | VH anti- CD4-2 | 200 | Construct of MUC1- | 247 |
| | | | | 5E5-A-lRES-BCMA-B | |
| CAR 1 of MUC1-2- | 210 | CAR 1 of MUC1-5E5- | 205 | CAR 1 of MUC1-5E5- | 202 |
| A-IRES-CD33-A | | B-IRES-CD33-A | | A-IRES-BCMA-B | |
| CAR 2 of MUC1-2- | 255 | CAR 2 of MUC1-5E5- | 255 | CAR 2 of MUC1-5E5- | 248 |
| A-IRES-CD33-A | | B-IRES-CD33-A | | A-IRES-BCMA-B | |
| Construct | 261 | Construct ofMUC1- | 257 | Construct of MUC1- | 249 |
| ofMUC1-2-B- | | 5E5-A-IRES-CD33-B | | 5E5-B-IRES-BCMA-B | |
| IRES-CD33-A | | | | | |
| CAR 1 of MUC1-2- | 212 | CAR 1 of MUC1-5E5- | 202 | CAR 1 of MUC1-5E5- | |
| B-IRES-CD33-A | | A-IRES-CD33-B | | B-IRES-BCMA-B | |
| CAR 2 of MUC1-2- | 255 | CAR 2 of MUC1-5E5- | 258 | CAR 2 of MUC1-5E5- | |
| B-IRES-CD33-A | | A-IRES-CD33-B | | B-IRES-BCMA-B | |
| Construct | 262 | Construct ofMUC1- | 259 | Construct of MUC1-2- | 250 |
| ofMUC1-2-A- | | 5E5-B-IRES-CD33-B | | A-IRES-BCMA-A | |
| IRES-CD33-B | | | | | |
| CAR 1 of MUC1-2- | 210 | CAR 1 of MUC1-5E5- | 205 | CAR 1 of MUC1-2-A- | 210 |
| A-IRES-CD33-B | | B-IRES-CD33-B | | IRES-BCMA-A | |
| CAR 2 of MUC1-2- | 258 | CAR 2 of MUC1-5E5- | 258 | CAR 2 of MUC1-2-A- | 245 |
| A-IRES-CD33-B | | B-IRES-CD33-B | | IRES-BCMA-A | |
| Construct | 263 | Construct ofMUC1-2- | 260 | Construct of MUC1-2- | 251 |
| ofMUC1-2-B- | | A-IRES-CD33-A | | B-IRES-BCMA-A | |
| IRES-CD33-B | | | | | |
| CAR 1 of MUC1-2- | 212 | Construct ofMUC1-2- | 253 | CAR 1 of MUC1-2-B- | 212 |
| B-IRES-CD33-B | | B-IRES-BCMA-B | | IRES-BCMA-A | |
| CAR 2 of MUC1-2- | 258 | CAR 1 of MUC1-2-B- | 212 | CAR 2 of MUC1-2-B- | 245 |
| B-IRES-CD33-B | | IRES-BCMA-B | | IRES-BCMA-A | |
| Construct | 254 | MUC1-2-B-IRES- | 248 | Construct of MUC1-2- | 252 |
| ofMUC1-5E5-A- | | BCMA-B CAR 2 | | A-IRES-BCMA-B | |
| IRES-CD33-A | | | | | |
| CAR 1 of MUC1- | 202 | MUC1-5E5-B-IRES- | 256 | CAR 1 of MUC1-2-A- | 210 |
| 5E5-A-IRES- | | CD33-A | | IRES-BCMA-B | |
| CD33-A | | | | | |
| CAR 2 of MUC1- | 255 | CAR 2 of MUC1-2-A- | 248 | MUC1-5e5Panko- | 264 |
| 5E5-A-lRES- | | IRES-BCMA-B | | enhanced scFc | |
| CD33-A | | | | | |
| MUC1-Panko5e5 | 265 | hinge and/or | 266 | hinge and/or | 267 |
| -enhanced scFc | | transmembrane | | transmembrane | |
| | | domain A | | domain B | |
| hinge and/or | 268 | hinge and/or | 269 | MUC1-5e5Panko- | 270 |
| transmembrane | | transmembrane | | enhanced scFc | |
| domain C | | domain D | | A 41BB CD2 zeta | |
| MUC1-5e5Panko- | 271 | MUC1-5e5Panko- | 272 | MUC1-5e5Panko- | 273 |
| enhanced | | enhanced scFc | | enhanced scFc | |
| scFc B 41BB CD2 | | C 41BB CD2 zeta | | D 41BB CD2 zeta | |
| zeta | | | | | |
| MUC1-Panko5e5- | 274 | MUC1-Panko5e5- | 275 | MUC1-Panko5e5- | 276 |
| enhanced | | enhanced scFc | | enhanced scFc C | |
| scFc A 41BB CD2 | | B 41BB CD2 zeta | | 41BB CD2 zeta | |
| zeta | | | | | |
| MUC1-Panko5e5- | 277 | GS linker | 278 | Construct of TSHR | 279 |
| enhanced | | | | CAR | |
| scFc D 41BB CD2 | | | | | |
| zeta | | | | | |
| CD8a Hinge & | 280 | IL-17C | 296 | IL12- IgG4 Hinge | 313 |
| transmembrane | | Nucleic acid | | &CD8a | |
| | | Sequence | | transmembrane | |
| CD8a | 281 | IL-17C | 297 | IL12R132 cytoplasmic | 314 |
| transmembrane | | aa Sequence | | | |
| IgG4 Hinge&CD8a | 282 | IL-17D | 298 | IL18R1 cytoplasmic | 315 |
| transmembrane | | Nucleic acid | | | |
| | | Sequence | | | |
| IL-2 | 283 | IL-17D | 299 | IL23R cytoplasmic | 316 |
| Nucleic acid | | aa Sequence | | | |
| Sequence | | | | | |
| IL-2 | 285 | IL-17F | 300 | Gp130 (IL65T) | 317 |
| aa Sequence | | Nucleic acid | | cytoplasmic | |
| Sequence | | | | | |
| IL-6 | 286 | IL-17F | 301 | IL15Ra, cytoplasmic | 318 |
| | | aa Sequence | | | |
| Nucleic acid | | | | | |
| Sequence | | | | | |
| IL-6 | 287 | IL-23A | 302 | IL121Rβ1 | 319 |
| aa Sequence | | Nucleic acid | | cytoplasmic | |
| | | Sequence | | | |
| IL-7 | 288 | IL-23A | 303 | 41BB+cd3zeta+ IL | 320 |
| Nucleic acid | | aa Sequence | | receptor cytoplasmic | |
| Sequence | | | | region | |
| IL-7 | 289 | IL-18 | 304 | scFv+hinge+transmem- | 321 |
| aa Sequence | | Nucleic acid | | brane+41BB+ IL | |
| | | Sequence | | receptor cytoplasmic | |
| | | | | region +cd3zeta | |
| IL-15 | 290 | IL-18 | 305 | scFv+hinge+transmem- | 322 |
| Nucleic acid | | aa Sequence | | brane+ IL receptor | |
| Sequence | | | | cytoplasmic region | |
| | | | | +41BB +cd3zeta | |
| IL-15 | 291 | IL-12 ap35 | 306 | 41BB promoter | 323 |
| aa Sequence | | Nucleic acid | | | |
| | | equence | | | |
| IL-17A | 292 | IL-12αp35 | 307 | CD25 enhancer + | 324 |
| Nucleic acid | | aa Sequence | | minimal TK promoter | |
| Sequence | | | | | |
| IL-17A | 293 | IL-12β40 | 308 | CD69 enhancer + | 325 |
| aa Sequence | | Nucleic acid | | minimal TK promoter | |
| | | Sequence | | | |
| IL-17B | 294 | IL-12 βp40 | 309 | IFN-gamma promoter | 326 |
| Nucleic acid | | aa Sequence | | | |
| Sequence | | | | | |
| IL-17B | 295 | Fusion IL-12 | 310 | 2A | 327 |
| aa Sequence | | | | | |
| Hypoxia promoter | 330 | Fusion IL-23 | 311 | IFN-γ | 328 |
| (example 2) | | | | | |
| Transcription | | | | | |
| factor binding | | | | | |
| sites. | | | | | |
| Hypoxia promoter | 331 | IL12- CD8a Hinge & | 312 | hPDE5 | 329 |
| (example 3) | | transmembrane | | | |
| Transcription | | | | | |
| factor binding | | | | | |
| sites. | | | | | |
| NFAT promoter | 332 | Hypoxia promoter | 338 | TNF-alpha | 347 |
| (example 1) | | (example 1) the | | | |
| Transcription | | minimal promoter | | | |
| factor binding | | | | | |
| sites. | | | | | |
| NFAT promoter | 333 | Hypoxia promoter | 339 | Lymphotoxin | 348 |
| (example 2) | | (example 2) the | | beta (TNF-C) | |
| Transcription | | minimal promoter | | | |
| factor binding | | | | | |
| sites. | | | | | |
| FOXP3 promoter | 334 | Hypoxia promoter | 340 | OX40L | 349 |
| (example1) | | (example 3) the | | | |
| Transcription | | minimal promoter | | | |
| factor binding | | | | | |
| sites. | | | | | |
| Hypoxia promoter | 335 | NFAT promoter | 341 | CD154 | 350 |
| (example 1) | | (example 1) the | | | |
| Transcription | | minimal promoter | | | |
| factor binding | | | | | |
| sites. | | | | | |
| NFkB promoter | 336 | NFAT promoter | 342 | FasL | 351 |
| (example1) | | (example 2) the | | | |
| Transcription | | minimal promoter | | | |
| factor binding | | | | | |
| sites. | | | | | |
| NFkB promoter | 337 | FOXP3 promoter | 343 | CD70 | 352 |
| (examp1e2) | | (example1) the | | | |
| Transcription | | minimal promoter | | | |
| factor binding | | | | | |
| sites. | | | | | |
| CXCl1 | 364 | FOXP3 promoter | 344 | CD153 | 353 |
| | | (example2) the | | | |
| | | minimal promoter | | | |
| CXCL2 | 365 | NFkB promoter | 345 | 4-1BB ligand | 354 |
| | | (example1) the | | | |
| | | minimal promoter | | | |
| CXCL3 | 366 | NFkB promoter | 346 | TRAIL | 355 |
| | | (examp1e2) the | | | |
| | | minimal promoter | | | |
| CXCL4 | 367 | CXCL11 | 374 | RANKL | 356 |
| CXCL5 | 368 | CXCL12 | 375 | TWEAK | 357 |
| CXCL6 | 369 | CXCL13 | 376 | APRIL | 358 |
| CXCL7 | 370 | CXCL14 | 377 | LIGHT | 359 |
| CXCL8 | 371 | CCL1 | 378 | NGF, | 360 |
| CXCL9 | 372 | CCL2 | 379 | TNFSF18 | 361 |
| CXCL10 | 373 | CCL3 | 380 | TNFSF15 | 362 |
| ICOS ligand | 405 | CCl3L1 | 381 | Ectodysplasin-A | 363 |
| CD80 | 406 | CCl4 | 382 | IL2 receptor CD | 415 |
| CD86 | 407 | CCl5 | 383 | IL6 receptor CD | 418 |
| scFv against PD1 | 408 | CCl7 | 384 | IL7 receptor CD | 421 |
| scFv against | 409 | CCl8 | 385 | IL12 receptor CD | 424 |
| PDL1 | | | | | |
| B7-H3 scFv 1 | 410 | CCl11 | 386 | IL15 receptor CD | 427 |
| B7-H3 scFv2 | 411 | CCL13 | 387 | IL21 receptor CD | 430 |
| B7-H3 scFv3 | 412 | CCl14 | 388 | IL23 receptor CD | 433 |
| IL2 receptor ED | 413 | CCL15 | 389 | CD4 TM | 434 |
| IL6 receptor ED | 416 | CCl16 | 390 | CD8 TM | 436 |
| IL7 receptor ED | 419 | CCL17 | 391 | CD27 TM | 438 |
| IL12 receptor ED | 422 | CCl18 | 392 | CD28 TM | 440 |
| IL15 receptor ED | 425 | CCL19 | 393 | CD137 TM | 442 |
| OL21 receptor ED | 428 | CCL20 | 394 | PD1 TM | 444 |
| IL23 receptor ED | 431 | CCL21 | 395 | PDL1 TM | 446 |
| IL2 receptor TM | 414 | CCL22 | 396 | CD4 CD | 435 |
| IL6 receptor TM | 417 | CCL23 | 397 | CD8 CD | 437 |
| IL7 receptor TM | 420 | CCL24 | 398 | CD27 CD | 439 |
| IL12 receptor TM | 423 | CCL25 | 399 | CD28 CD | 441 |
| IL15 receptor TM | 426 | CCL26 | 400 | CD137 CD | 443 |
| IL21 receptor TM | 429 | CCL27 | 401 | PD1 CD | 445 |
| IL23 receptor TM | 432 | CCL28 | 402 | PDL1 CD | 447 |
| IL2 | 448 | Lymphotactin | 403 | IL21 | 452 |
| IL7 | 449 | CX3C L1 | 404 | IL23 | 453 |
| IL12 | 450 | Hif VHL-interaction | 457 | IL33 | 454 |
| | | domain : Hif amino | | | |
| | | acid 344-417 | | | |
| IL15 | 451 | Hif amino acid 380- | 458 | TNFα | 455 |
| | | 603 | | | |
| siglec-15 antigen | 460 | siglec-15 antigen 1 | 459 | TNFβ | 456 |
| 2 | | | | | |
| siglec-15 antigen | 461 | siglec-15 antigen 6 | 464 | GS linker sequence | 467 |
| 3 | | | | | |
| siglec-15 antigen | 462 | siglec-15 antigen 7 | 465 | EA linker sequence | 468 |
| 4 | | | | | |
| siglec-15 antigen | 463 | siglec-15 antigen 8 | 466 | NFAT6x + minimal | 469 |
| 5 | | | | IL12 promoter | |

TM: Transmembrane domain
CD: cytoplasmic domain
EM: Extracellular daemon

TABLE 3

| | Expression Condition for | |
|---|---|---|
| transcription factors | notes | Example of constructs |
| Hif1a | hypoxia-induced | Hifl a binding site +minimal promoter |
| | expression | + CDS of IL |
| NFAT | transcription factor in | NFAT binding site +minimal |
| | immune response | promoter + CDS of IL |
| FOXP3 | transcription factor in T-reg | FOXP3 binding site +minimal |
| | | promoter + CDS of IL |
| NFkB | transcription factor in | NFkB binding site +minimal promoter |
| | immune response | + CDS of IL |

TABLE 4

| isolated | |
|---|---|
| nucleic | |
| acid | |
| sequence | Nucleic Acid Construct using Encoded Peptides |
| 1 | CAR +P2A+ IL+CD8a Hinge & transmembrane |
| 2 | CAR +P2A+ IL+ IgG4 Hinge & CH2CH3 & CD4 transmem- |
| | brane |
| 3 | CAR +Hypoixa/ NFAT/FOXP3/ NFkB promoter + IL+CD8a |
| | Hinge & transmembrane |
| 4 | CAR + Hypoixa/NFAT/FOXP3/NFkB promoter + IL+CD8a |
| | IgG4Hinge & CH2CH3 & CD4 transmembrane |
| 5 | scFv+hinge+transmembrane+41BB+cd3zeta+IL receptor |
| | cytoplasmic region |
| 6 | scFv + hinge + transmembrane+41BB+ IL receptor cyto- |
| | plasmic region +cd3zeta |
| 7 | scFv + hinge+ transmembrane+ IL receptor cytoplasmic region |
| | +41BB +cd3zeta |

### Exemplary Embodiments

[0212] The following are exemplary embodiments:
[0213] 1. An isolated nucleic acid sequence comprising a first nucleic acid sequence and a second or an additional nucleic acid sequence, the first nucleic acid sequence encoding a chimeric antigen receptor (CAR), the second or additional nucleic acid sequence encoding one or more therapeutic agents. For example, the one or more therapeutic agents are or comprise of IL-2, IL-6, IL-7, IL-15, IL-17, IL-23, or a combination thereof.
[0214] 2. An isolated nucleic acid sequence comprising a first nucleic acid sequence and a second or an additional nucleic acid sequence, the first nucleic acid sequence encoding a chimeric antigen receptor (CAR), the second or additional nucleic acid sequence encoding a therapeutic agent that is or comprises at least one of TNFRSF superfamily member receptor activation antibodies or membrane-bound forms thereof, TNFRSF superfamily member ligands or the membrane-bound form thereof, chemokines or membrane-bound forms thereof, antibodies to the chemokines, or antibodies to receptors of the chemokines or the membrane-bound forms thereof, and D28 family's ligands that correspond to the sequences in Table 2-4.
[0215] 3. A population of CAR cells comprising the first nucleic acid sequence and the additional nucleic acid sequence of embodiments 1 or 2, wherein the CAR cells comprise lymphocyte, leukocyte, or PBMC.
[0216] 4. The population of CAR cells of embodiment 3, wherein the CAR and the one or more therapeutic agents are produced in the form of a polyprotein, which is cleaved to generate separate CAR and therapeutic agent molecules.
[0217] 5. The population of CAR cells of embodiment 4, wherein the polyprotein comprises a cleavable moiety between the CAR and the therapeutic agent, the cleavable moiety comprises a 2A peptide, the 2A peptide comprises P2A or T2A, and/or the CAR and the therapeutic agent are each constitutively expressed.
[0218] 6. The population of CAR cells of embodiment 3, wherein the CAR cells comprise: a third nucleic acid sequence encoding a second or an additional CAR binding an antigen that is different from the CAR, or the second or additional CAR binding a solid tumor antigen, and the CAR binds an antigen of a white blood cell.
[0219] 7. A pharmaceutical composition comprising the population of CAR cells of one of embodiments 3-6. The pharmaceutical composition is used to treat a patient having a solid tumor.
[0220] 8. A method of inducing or causing a T cell response in a subject in need thereof and/or treating a tumor of the subject, the method comprising administering an effective amount of the composition of embodiment 7 to the subject.
[0221] 9. A modified cell comprising one or more CARs, wherein the cell is engineered to express and secrete a therapeutic agent that is or comprises at least one of IL-2, IL-6, IL-7, IL-15, IL-17, and IL-23.
[0222] 10. A method of inducing or causing or enhancing T cell response, treating cancer, or enhancing cancer treatment, the method comprising: administrating an effective amount of the composition of T cells comprising one or more CARs, wherein the cell is engineered to express and secrete one or more therapeutic agents. For example, the therapeutic agent is or comprises IL-2, IL-6, IL-7, IL-15, IL-17, IL-23, or a combination thereof and the T cell response is enhanced as compared to the administration of T cells that do not express or secrete the therapeutic agent.
[0223] 11. A method of inducing or causing or enhancing T cell response, treating cancer, or enhancing cancer treatment, the method comprising: administering an effective amount of the composition of a population of T cells comprising a CAR; and administering an effective amount of one or more therapeutic agents. For example, the therapeutic agent is or comprises IL-2, IL-6, IL-7, IL-15, IL-17, IL-23, or a combination thereof, wherein the T cell response is enhanced as compared to the administration of CAR T cells without the administration of therapeutic agent.
[0224] 12. The method of embodiment 11, wherein administering an effective amount of the therapeutic agent comprises intravenous delivery of an amount of human IL-6 in the range of about 0.5-50 ug per kilogram of body weight.
[0225] 13. The modified cell or the method of one of embodiments 9-12, wherein the T cell comprises a second or an additional CAR binding a solid tumor antigen, and the first CAR binds an antigen of a white blood cell.
[0226] 14. The modified cell or the method of embodiment 13, wherein the solid tumor antigen is tMUC 1, PRLR, CLCA1, MUC12, GUCY2C, GPR35, CR1L, MUC 17, TMPRSS11B, MUC21, TMPRSS11E, CD207, SLC30A8, CFC1, SLC12A3, SSTR1, GPR27, FZD10, TSHR, SIGLEC15, SLC6A3, KISS1R, QRFPR, GPR119, CLDN6, UPK2, ADAM12, SLC45A3, ACPP, MUC21, MUC16, MS4A12, ALPP, CEA, EphA2, FAP, GPC3, IL13-Rα2, Mesothelin, PSMA, ROR1, VEGFR-II, GD2, FR-α, ErbB2, EpCAM, EGFRvIII, PSCA, or EGFR, and the B cell antigen is CD19, CD20, CD22, or BCMA.
[0227] 15. The isolated nucleic acid sequence, the modified cell, or the method of any one of embodiments 2-14, wherein the therapeutic agent is IL-6 or IL-7.
[0228] 16. The isolated nucleic acid sequence, the modified cell, or the method of any one of embodiments 2-14, wherein the CAR comprises an extracellular domain, a transmembrane domain, and an intracellular domain, the extracellular domain binding an antigen.
[0229] 17. The isolated nucleic acid sequence, the modified cell, or the method of embodiment 16, wherein the intracellular domain comprises a co-stimulatory domain that comprises an intracellular domain of a co-stimulatory molecule selected from the group consisting of CD27, CD28, 4-1BB, OX40, CD30, CD40, PD-1, ICOS, lymphocyte function-associated antigen-1 (LFA-1), CD2, CD7, LIGHT, NKG2C, B7-H3, and any combination thereof.
[0230] 18. The isolated nucleic acid sequence, the modified cell, or the method of embodiment 17, wherein the antigen is Epidermal growth factor receptor (EGFR), Variant III of the epidermal growth factor receptor (EGFRvIII), Human epidermal growth factor receptor 2 (HER2), Mesothelin (MSLN), Prostate-specific membrane antigen (PSMA), Carcinoembryonic antigen (CEA), Disialoganglioside 2 (GD2), Interleukin-13Ra2 (IL13Rα2), Glypican-3 (GPC3), Carbonic anhydrase IX (CAIX), L1 cell adhesion molecule (L1-CAM), Cancer antigen 125 (CA125), Cluster of differentiation 133 (CD133), Fibroblast activation protein (FAP), Cancer/testis antigen 1B (CTAG1B), Mucin 1 (MUC1), Folate receptor-α (FR-α), CD19, FZD10, TSHR, PRLR, Muc 17, GUCY2C, CD207, CD3, CD5, B-Cell Maturation Antigen (BCMA), or CD4.
[0231] 19. The isolated nucleic acid sequence, the modified cell, or the method of any one of embodiments 2-18, wherein the modified cell or T cells comprise a dominant negative PD-1 mutant such that PD-1/PDI-1 signaling pathway of the cell is interfered.
[0232] 20. The isolated nucleic acid sequence, the modified cell, or the method of any one of embodiments 2-19, wherein the nucleic acid sequence encoding the therapeutic agent is present in the modified cell in a recombinant DNA construct, in an mRNA, or in a viral vector.
[0233] 21. The isolated nucleic acid sequence, the modified cell, or the method of any one of embodiments 2-19, wherein the modified cell comprises an mRNA encoding the therapeutic agent, wherein the mRNA is not integrated into the genome of the modified cell.
[0234] 22. The isolated nucleic acid sequence, the modified cell, or the method of any one of embodiments 2-21, wherein the therapeutic agent corresponds to at least one of sequence listed in Table 2.
[0235] 23. The isolated nucleic acid sequence, the modified cell, or the method of any one of embodiments 2-21, wherein the modified cell comprises a nucleic acid sequence comprising a promoter comprising a binding site for a transcription modulator that modulates the expression of the therapeutic agent in the cell.
[0236] 24. The isolated nucleic acid sequence, the modified cell, or the method of embodiment 23, wherein the transcription modulator is or includes Hif1a, N FAT, FOXP3, and/or NFkB.
[0237] 25. The isolated nucleic acid sequence, the modified cell, or the method of embodiment 24, wherein the promoter is responsive to the transcription modulator.
[0238] 26. The isolated nucleic acid sequence, the modified cell, or the method of embodiment 25, wherein the promoter is operably linked to the nucleic acid sequence encoding the therapeutic agent such that the promoter drives expression of the therapeutic agent in the cell.
[0239] 27. The isolated nucleic acid sequence, the modified cell, or the method of embodiment 23, wherein the promoter and the binding site correspond to the sequences listed in Table 2-4.
[0240] 28. An isolated nucleic acid sequence comprising a first nucleic acid sequence and a second nucleic acid sequence, the first nucleic acid sequence encoding a chimeric antigen receptor (CAR), the second nucleic acid sequence encoding a therapeutic agent and a transmembrane domain such that the therapeutic agent is associated or bound to cell membrane. Examples of the isolated nucleic acid sequence are listed in Table 4 (1-4)
[0241] 29. A modified cell comprising the isolated nucleic acid sequence of embodiment 28.
[0242] 30. A pharmaceutical composition comprising the population of the cells of embodiment 3.
[0243] 31. A method of inducing or causing T cell response in a subject in need thereof and/or treating a tumor of the subject, the method comprising administering an effective amount of the composition of embodiment 30 to the subject.
[0244] 32. A modified cell comprising a first nucleic acid sequence encoding a CAR, and a second nucleic acid sequence encoding a therapeutic agent and a transmembrane domain such that the therapeutic agent is associated or bound to the membrane of the modified cell.
[0245] 33. The modified cell of one of embodiments 29-32, wherein the therapeutic agent is a cytokine.
[0246] 34. The modified cell of embodiment 33, wherein the cytokine comprises multiple submits, the second nucleic acid encodes the multiple subunits, one or more linkers connecting the multiple subunits, and the transmembrane domain.
[0247] 35. The modified cell of embodiment 33, wherein the second nucleic acid sequence comprises a nucleic acid sequence of or encodes an amino acid sequence of SEQ ID NO: 280-313.
[0248] 36. The modified cell of embodiment 33, wherein the cytokine is or comprises at least one of IL-2, IL-6, IL-7, IL-12, IL-15, IL-17, IL-18, and IL-23.
[0249] 37. The modified cell of any one of embodiments 29-36, wherein the CAR comprises an extracellular domain, a transmembrane domain, and an intracellular domain, wherein the extracellular domain binds an antigen.
[0250] 38. The modified cell of embodiment 37, wherein the intracellular domain comprises a co-stimulatory domain that comprises an intracellular domain of a co-stimulatory molecule selected from the group consisting of CD27, CD28, 4-1BB, OX40, CD30, CD40, PD-1, ICOS, lymphocyte function-associated antigen-1 (LFA-1), CD2, CD7, LIGHT, NKG2C, B7-H3, and any combination thereof.
[0251] 39. The modified cell of embodiment 37, wherein the antigen is Epidermal growth factor receptor (EGFR), Variant III of the epidermal growth factor receptor (EGFRvIII), Human epidermal growth factor receptor 2 (HER2), Mesothelin (MSLN), Prostate-specific membrane antigen (PSMA), Carcinoembryonic antigen (CEA), Disialoganglioside 2 (GD2), Interleukin-13Ra2 (IL13Rα2), Glypican-3 (GPC3), Carbonic anhydrase IX (CAIX), L1 cell adhesion molecule (L1-CAM), Cancer antigen 125 (CA125), Cluster of differentiation 133 (CD133), Fibroblast activation protein (FAP), Cancer/testis antigen 1B (CTAG1B), Mucin 1 (MUC1), Folate receptor-α (FR-α), CD19, FZD10, TSHR, PRLR, Muc 17, GUCY2C, CD207, CD3, CD5, B-Cell Maturation Antigen (BCMA), or CD4.
[0252] 40. The modified cell of one of embodiments 29-39, wherein the second nucleic acid sequence comprises a promoter comprising a binding site for a transcription modulator that modulates the expression of the therapeutic agent in the cell.
[0253] 41. The modified cell of embodiment 40, wherein the transcription modulator is or includes Hif1a, NFAT, FOXP3, and/or NFkB.
[0254] 42. A method of inducing or causing or enhancing T cell response, treating cancer, or enhancing cancer treatment, the method comprising: administrating an effective amount of the composition of the modified cells of one of embodiments 29-41.
[0255] 43. An isolated nucleic acid sequence encoding a binding molecule comprising an extracellular domain, a transmembrane domain, and an intracellular domain, the extracellular domain binds an antigen, the intracellular domain comprising a cytoplasmic domain of a receptor of a therapeutic agent. Examples of the isolated nucleic acid sequence are listed in Table 4 (5-8)
[0256] 44. A cell comprising the isolated nucleic acid sequence of embodiment 43.
[0257] 45. A pharmaceutical composition comprising the population of the cells of embodiment 44.
[0258] 46. A method of inducing or causing T cell response in a subject in need thereof and/or treating a tumor of the subject, the method comprising administering an effective amount of the composition of embodiment 45 to the subject.
[0259] 47. A modified cell comprising a binding molecule comprising an extracellular domain, a transmembrane domain, and an intracellular domain, the extracellular domain binds an antigen, the intracellular domain comprising a cytoplasmic domain of a therapeutic agent.
[0260] 48. The isolated nucleic acid sequence and the modified cell of any one of embodiments 43-47, wherein the therapeutic agent is a cytokine.
[0261] 49. The isolated nucleic acid sequence and the modified cell of any one of embodiments 43-47, wherein the receptor of the therapeutic agent is or comprises IL12Rβ2, IL18R1, IL123R, GP130, IL15Ra, or IL12Rβ1.
[0262] 50. The isolated nucleic acid sequence and the modified cell of any one of embodiments 43-47, wherein the therapeutic agent is or comprises IL12, IL18, IL123, IL-6, or IL-15.
[0263] 51. The isolated nucleic acid sequence and the modified cell of any one of embodiments 43-47, wherein the cytoplasmic domain is or comprises at least one of the amino acid sequences of SEQ ID Nos: 314-319.
[0264] 52. The isolated nucleic acid sequence and the modified cell of any one of embodiments 43-47, wherein the modified cell comprises the isolated nucleic acid sequence comprising any one of the amino acid sequences of SEQ ID Nos: 320-322.
[0265] 53. The isolated nucleic acid sequence and the modified cell of any one of embodiments 43-51, wherein the modified cell comprises an additional nucleic acid sequence, the isolated nucleic acid sequence comprises additional nucleic acid sequence, and the additional nucleic acid sequence comprises 41-BB domain and CD3 Zeta domain, a nucleic acid sequence encoding the cytoplasmic domain is located between the 41-BB domain and CD3 zeta domain.
[0266] 54. The isolated nucleic acid sequence and the modified cell of any one of embodiments 43-51, wherein the modified cell comprises an additional nucleic acid sequence, the isolated nucleic acid sequence comprises additional nucleic acid sequence, and the additional nucleic acid sequence comprises 41-BB domain and CD3 Zeta domain, a nucleic acid sequence encoding the cytoplasmic domain is located before the 41-BB domain ordered from a N-terminal of the cytoplasmic domain.
[0267] 55. The isolated nucleic acid sequence and the modified cell of any one of embodiments 43-51, wherein the modified cell comprises an additional nucleic acid sequence, the isolated nucleic acid sequence comprises additional nucleic acid sequence, and the additional nucleic acid sequence comprises 41-BB domain and CD3 Zeta domain, a nucleic acid sequence encoding the cytoplasmic domain is located after the CD3 Zeta domain ordered from a N-terminal of the cytoplasmic domain.
[0268] 56. The isolated nucleic acid sequence and the modified cell of any one of embodiments 43-55, wherein the intracellular domain comprises a co-stimulatory domain that comprises an intracellular domain of a co-stimulatory molecule selected from the group consisting of CD27, CD28, 4-1BB, OX40, CD30, CD40, PD-1, ICOS, lymphocyte function-associated antigen-1 (LFA-1), CD2, CD7, LIGHT, NKG2C, B7-H3, and any combination thereof.
[0269] 57. The isolated nucleic acid sequence and the modified cell of embodiment 56, wherein the antigen is Epidermal growth factor receptor (EGFR), Variant III of the epidermal growth factor receptor (EGFRvIII), Human epidermal growth factor receptor 2 (HER2), Mesothelin (MSLN), Prostate-specific membrane antigen (PSMA), Carcinoembryonic antigen (CEA), Disialoganglioside 2 (GD2), Interleukin-13Ra2 (IL13Rα2), Glypican-3 (GPC3), Carbonic anhydrase IX (CAIX), L1 cell adhesion molecule (L1-CAM), Cancer antigen 125 (CA125), Cluster of differentiation 133 (CD133), Fibroblast activation protein (FAP), Cancer/testis antigen 1B (CTAG1B), Mucin 1 (MUC1), Folate receptor-α (FR-α), CD19, FZD10, TSHR, PRLR, Muc 17, GUCY2C, CD207, CD3, CD5, B-Cell Maturation Antigen (BCMA), or CD4.
[0270] 58. The modified cell or the cell of any one of embodiments 44-57, wherein a signaling pathway is activated when the binding molecule binds to the antigen.
[0271] 59. An isolated nucleic acid sequence comprising a nucleic acid sequence and an additional nucleic acid sequence, the nucleic acid sequence encoding a chimeric antigen receptor (CAR), the additional nucleic acid sequence encoding a therapeutic agent that is or comprises at least one of IL-2, IL-6, IL-7, IL-15, IL-17, and IL-23.
[0272] 60. An isolated nucleic acid sequence comprising a nucleic acid sequence and an additional nucleic acid sequence, the nucleic acid sequence encoding a chimeric antigen receptor (CAR), the additional nucleic acid sequence encoding a therapeutic agent that is or comprises at least one of TNFRSF superfamily member receptor activation antibodies or membrane-bound forms thereof, TNFRSF superfamily member ligands or the membrane-bound form thereof, chemokines or membrane-bound forms thereof, antibodies to the chemokines, or antibodies to receptors of the chemokines or the membrane-bound forms thereof, and D28 family's ligands that correspond to the sequences in Table 2-4.
[0273] 61. A population of CAR cells comprising the nucleic acid sequence and the additional nucleic acid sequence of embodiments 59 or 60, wherein the CAR cells comprise lymphocyte, leukocyte, or PBMC.
[0274] 62. The population of CAR cells of embodiment 61, wherein the CAR and the therapeutic agent are produced in the form of a polyprotein, which is cleaved to generate separate CAR and therapeutic agent molecules.
[0275] 63. The population of CAR cells of embodiment 62, wherein the polyprotein comprises a cleavable moiety between the CAR and the therapeutic agent, the cleavable moiety comprises a 2A peptide, the 2A peptide comprises P2A or T2A, and/or the CAR and the therapeutic agent are each constitutively expressed.
[0276] 64. The population of CAR cells of embodiment 61, wherein the CAR cells comprise: a third nucleic acid sequence encoding an additional CAR binding to an antigen that is different from the CAR, or
[0277] the additional CAR binding a solid tumor antigen, and the CAR binds an antigen of a white blood cell.
[0278] 65. A pharmaceutical composition comprising the population of the CAR cells of one of embodiments 61-64.
[0279] 66. A method of causing T cell response in a subject in need thereof and/or treating a tumor of the subject, the method comprising administering an effective amount of the composition of embodiment 65 to the subject.
[0280] 67. A modified cell comprises one or more CARs, wherein the cell is engineered to express and secrete a therapeutic agent that is or comprises at least one of IL-2, IL-6, IL-7, IL-15, IL-17, and IL-23.
[0281] 68. A method of causing or enhancing T cell response, treating cancer, or enhancing cancer treatment, the method comprising: administrating an effective amount of the composition of T cells comprising one or more CARs, wherein the cell is engineered to express and secrete a therapeutic agent that is or comprises at least one of IL-2, IL-6, IL-7, IL-15, IL-17, and IL-23, and the T cell response is enhanced as compared to the administration of T cells that do not express or secrete the therapeutic agent.
[0282] 69. A method of causing or enhancing T cell response, treating cancer, or enhancing cancer treatment, the method comprising:
[0283] administering an effective amount of the composition of a population of T cells comprising a CAR; and
[0284] administering an effective amount of a therapeutic agent that is or comprises at least one of IL-2, IL-6, IL-7, IL-15, IL-17, and IL-23, wherein the T cell response is enhanced as compared to the administration of CAR T cells without the administration of therapeutic agent.
[0285] 70. The method of embodiment 69, wherein the administering the effective amount of the therapeutic agent comprises intravenous delivery of an amount of human IL-6 in the range of about 0.5-50 ug per kilogram of body weight.
[0286] 71. The modified cell or the method of one of embodiments 67-70, wherein the T cell comprises an additional CAR binding a solid tumor antigen, and the CAR binds an antigen of a white blood cell.
[0287] 72. The modified cell or the method of embodiment 71, wherein the solid tumor antigen is tMUC 1, PRLR, CLCA1, MUC12, GUCY2C, GPR35, CR1L, MUC 17, TMPRSS11B, MUC21, TMPRSS11E, CD207, SLC30A8, CFC1, SLC12A3, SSTR1, GPR27, FZD10, TSHR, SIGLEC15, SLC6A3, KISS1R, QRFPR, GPR119, CLDN6, UPK2, ADAM12, SLC45A3, ACPP, MUC21, MUC16, MS4A12, ALPP, CEA, EphA2, FAP, GPC3, IL13-Rα2, Mesothelin, PSMA, ROR1, VEGFR-II, GD2, FR-α, ErbB2, EpCAM, EGFRvIII, PSCA, or EGFR, and the B cell antigen is CD19, CD20, CD22, or BCMA.
[0288] 73. The isolated nucleic acid sequence, the modified cell, or the method of any one of embodiments 60-72, wherein the therapeutic agent is IL-6 or IL-7.
[0289] 74. The isolated nucleic acid sequence, the modified cell, or the method of any one of embodiments 60-72, wherein the CAR comprises an extracellular domain, a transmembrane domain, and an intracellular domain, the extracellular domain binds an antigen.
[0290] 75. The isolated nucleic acid sequence, the modified cell, or the method of embodiment 74, wherein the intracellular domain comprises a co-stimulatory domain that comprises an intracellular domain of a co-stimulatory molecule selected from the group consisting of CD27, CD28, 4-1BB, OX40, CD30, CD40, PD-1, ICOS, lymphocyte function-associated antigen-1 (LFA-1), CD2, CD7, LIGHT, NKG2C, B7-H3, and any combination thereof.
[0291] 76. The isolated nucleic acid sequence, the modified cell, or the method of embodiment 75, wherein the antigen is Epidermal growth factor receptor (EGFR), Variant III of the epidermal growth factor receptor (EGFRvIII), Human epidermal growth factor receptor 2 (HER2), Mesothelin (MSLN), Prostate-specific membrane antigen (PSMA), Carcinoembryonic antigen (CEA), Disialoganglioside 2 (GD2), Interleukin-13Ra2 (IL13Rα2), Glypican-3 (GPC3), Carbonic anhydrase IX (CAIX), L1 cell adhesion molecule (L1-CAM), Cancer antigen 125 (CA125), Cluster of differentiation 133 (CD133), Fibroblast activation protein (FAP), Cancer/testis antigen 1B (CTAG1B), Mucin 1 (MUC1), Folate receptor-α (FR-α), CD19, FZD10, TSHR, PRLR, Muc 17, GUCY2C, CD207, CD3, CD5, B-Cell Maturation Antigen (BCMA), or CD4.
[0292] 77. The isolated nucleic acid sequence, the modified cell, or the method of any one of embodiments 60-76, wherein the modified cell or T cells comprise a dominant negative PD-1 mutant such that PD-1/PDI-1 signaling pathway of the cell is interfered.
[0293] 78. The isolated nucleic acid sequence, the modified cell, or the method of any one of embodiments 60-77, wherein the therapeutic agent is present in the modified cell in a recombinant DNA construct, in an mRNA, or in a viral vector.
[0294] 79. The isolated nucleic acid sequence, the modified cell, or the method of any one of embodiments 60-77, wherein the modified cell comprises a therapeutic agent mRNA encoding the therapeutic agent, and the mRNA is not integrated into the genome of the modified cell.
[0295] 80. The isolated nucleic acid sequence, the modified cell, or the method of any one of embodiments 60-79, wherein the therapeutic agent corresponds to at least one of sequence listed in Table 2-4.
[0296] 81. The isolated nucleic acid sequence, the modified cell, or the method of any one of embodiments 60-79, wherein the modified cell comprises a nucleic acid sequence comprising a promoter comprising a binding site for a transcription modulator that modulates the expression of the therapeutic agent in the cell.
[0297] 82. The isolated nucleic acid sequence, the modified cell, or the method of embodiment 81, wherein the transcription modulator is or includes Hif1a, N FAT, FOXP3, and/or NFkB.
[0298] 83. The isolated nucleic acid sequence, the modified cell, or the method of embodiment 82, wherein the promoter is responsive to the transcription modulator.
[0299] 84. The isolated nucleic acid sequence, the modified cell, or the method of embodiment 83, wherein the promoter is operably linked to the nucleic acid sequence encoding the therapeutic agent such that the promoter drives expression of the therapeutic agent in the cell.
[0300] 85. The isolated nucleic acid sequence, the modified cell, or the method of embodiment 81, wherein the promoter and the binding site correspond to the sequences listed in Table 2-4.
[0301] 86. A modified cell comprises one or more CARs, wherein the cell is engineered to express and secrete a therapeutic agent such as a cytokine.
[0302] 87. A method of causing or enhancing T cell response, treating cancer, or enhancing cancer treatment, the method comprising: administrating an effective amount of the composition of T cells comprising one or more CARs, wherein the cell is engineered to express and secrete a therapeutic agent such as a cytokine.
[0303] 88. The modified cell or the method of one of embodiments 86-87, wherein the therapeutic agent that is or comprises IFN-γ.
[0304] 89. The modified cell or the method of one of embodiments 86-88, wherein the therapeutic agent that is or comprises IL-6 or IFN-γ, or a combination thereof. For example, the therapeutic agent may comprise SEQ ID NO: 287 or 328.
[0305] 90. The modified cell or the method of one of embodiments 86-89, wherein the therapeutic agent that is or comprises IL-15 or IL-12, or a combination thereof.
[0306] 91. The modified cell or the method of one of embodiments 86-90, wherein the small protein or the therapeutic agent is or comprises a recombinant or native cytokine. 92. The modified cell or the method of one of embodiments 86-91, wherein the therapeutic agent comprises a FC fusion protein associated with a small protein.
[0307] 93. The modified cell or the method of one of embodiments 86-92, wherein the small protein is or comprises IL-12, IL-15, IL-6 or IFN-γ.
[0308] 94. The modified cell or the method of one of embodiments 86-93, wherein expression and/or secretion is regulated by a controlling system such as an inducible expression system, or the modified cell is regulated by an inducible suicide expression.
[0309] 95. The modified cell or the method of one of embodiments 86-94, wherein the therapeutic agent activates macrophages and/or dendritic cells.
[0310] 96. The modified cell or the method of one of embodiments 86-95, wherein the therapeutic agent causes macrophages to remove granulocytes.
[0311] 97. The modified cell or the method of one of embodiments 86-96, wherein the therapeutic agent inhibits or suppresses growth of cancer cells.
[0312] 98. The modified cell or the method of one of embodiments 86-97, wherein the therapeutic agent is or comprises a recombinant or a native protein.
[0313] 99. The modified cell or the method of one of embodiments 86-98, wherein the modified cell comprises a modified programmed cell death protein 1 (PD-1) that is a dominant negative PD-1.
[0314] 100. The modified cell or the method of one of embodiments 86-99, wherein the one or more CARs comprise a CAR targeting a tumor cell.
[0315] 101. The modified cell or the method of one of embodiments 86-100, wherein the one or more CARs comprise a CAR binding a solid tumor antigen and an additional CAR binding a blood cell antigen such as a B cell antigen.
[0316] 102. The modified cell or the method of one of embodiments 86-100, wherein the solid tumor antigen is tMUC 1, PRLR, CLCA1, MUC12, GUCY2C, GPR35, CR1L, MUC 17, TMPRSS11B, MUC21, TMPRSS11E, CD207, SLC30A8, CFC1, SLC12A3, SSTR1, GPR27, FZD10, TSHR, SIGLEC15, SLC6A3, KISS1R, QRFPR, GPR119, CLDN6, UPK2, ADAM12, SLC45A3, ACPP, MUC21, MUC16, MS4A12, ALPP, CEA, EphA2, FAP, GPC3, IL13-Rα2, Mesothelin, PSMA, ROR1, VEGFR-II, GD2, FR-α, ErbB2, EpCAM, EGFRvIII, or EGFR, and the B cell antigen is CD19, CD20, CD22, or BCMA.
[0317] 103. The modified cell or the method of one of embodiments 86-102, wherein the solid tumor antigen comprises B7, CAIX, CD123, CD133, CD171, CD171/L1-CAM, CEA, Claudin 18.2, cMet, CS1, CSPG4, Dectin1, EGFR, EGFR vIII, EphA2, ERBB receptors, ErbB T4, ERBB2, FAP, Folate receptor 1, FITC, Folate receptor 1, FSH, GD2, GPC3, HA-1 H/HLA-A2, HER2, IL-11Ra, IL13 receptor a2, IL13R, IL13Rα2 (zetakine), Kappa, Leukemia, LewisY, Mesothelin, MUC1, NKG2D, NY-ESO-1, PSMA, ROR-1, TRAIL-receptor1, or VEGFR2, and the B cell antigen is CD19, CD20, CD22, or BCMA.
[0318] 104. The modified cell or the method of one of embodiments 86-103, wherein the T cell response is enhanced as compared to the administration of CAR T cells that do not express or secrete the therapeutic agent.
[0319] 105. The modified cell or the method of one of embodiments 86-104, wherein the modified cell comprises a nucleic acid sequence encoding hTERT or a nucleic acid encoding SV40LT, or a combination thereof, wherein the nucleic acid sequence encoding hTERT or a nucleic acid encoding SV40LT, or a combination thereof is integrated into the genome of the modified T cell, and the modified T cell constitutively expresses hTERT, SV40LT, or a combination thereof.
[0320] 106. The modified cell or the method of one of embodiments 86-105, wherein expression of the nucleic acid sequence encoding hTERT, a nucleic acid encoding SV40LT, or a combination thereof, is regulated by an inducible expression system, and/or the modified T cell comprises a nucleic acid sequence encoding a suicide gene.
[0321] 107. The modified cell or the method of one of embodiments 86-106, wherein the modified cell is derived from a healthy donor or the subject.
[0322] 108. The modified cell or the method of one of embodiments 86-107, wherein the TRAC gene of the modified cell is inactivated.
[0323] 109. The modified cell or the method of one of embodiments 86-108, wherein the modified cell has a reduced graft-versus-host disease (GVHD) response in a bioincompatible human recipient as compared to the GVHD response of the primary human T cell in response to allogenic CAR T treatment.
[0324] 110. The modified cell or the method of one of embodiments 86-109, wherein the modified cell has reduced amount PD-1 or has a dominant negative PD-1 such that an signaling pathway of the PD-1 is blocked.
[0325] 111. The modified cell or the method of one of embodiments 86-110, wherein the modified cell has reduced amount PD-1 or has a dominant negative PD-1 such that an signaling pathway of the PD-1 is blocked, the therapeutic agent is IL-12 or IFN-γ, or a combination thereof.
[0326] 112. The modified cell or the method of an embodiments 86-111, wherein the modified cell has reduced amount PD-1 or has a dominant negative PD-1 such that an signaling pathway of the PD-1 is blocked, the therapeutic agent comprises a CD40 agonist such as CP-870,893 from Pfizer.
[0327] 113. The modified cell or the method of an embodiments 86-112, wherein the modified cell comprises an additional therapeutic agent, the modified cell comprises a nucleic acid sequence encoding the therapeutic agent and an additional nucleic acid sequence encoding the additional therapeutic agent, and the nucleic acid sequence and the additional nucleic acid sequence are connected by an IRES element or a third nucleic acid sequence encoding a 2A peptide.
[0328] 114. The modified cell or the method of embodiment 113, wherein the therapeutic agent is IL-6, and the additional therapeutic agent is IFN-γ.
[0329] 115. The modified cell or the method of embodiment 113, wherein the therapeutic agent is IL-12, and the additional therapeutic agent is IFN-γ.
[0330] 116. The modified cell or the method of claim 113, wherein the therapeutic agent is CD40, and the additional therapeutic agent is IFN-γ.
[0331] 117. The modified cell or the method of an embodiments 86-116, wherein the modified cell comprises a nucleic acid sequence comprising a promoter comprising a binding site for a transcription modulator that modulates the expression and/or secretion of the therapeutic agent in the cell.
[0332] 118. The modified cell or the method of any one of embodiments 86-116, wherein the transcription modulator is or includes Hif1a, NFAT, FOXP3, and/or NFkB.
[0333] 119. The modified cell or the method of embodiment 118, wherein the promoter is responsive to the transcription modulator.
[0334] 120. The modified cell or the method of any one of embodiments 118-119, wherein the promoter is operably linked to the nucleic acid sequence encoding the therapeutic agent such that the promoter drives expression and/or secretion of the therapeutic agent in the cell.
[0335] 121. The modified cell or the method of any one of embodiments 118-120, wherein the promoter comprises at least one of SEQ ID Nos: 323-325.
[0336] 122. The modified cell or the method of any one of embodiments 86-120, wherein the modified cell comprises one or more nucleic acid sequences encoding a stimulus response element and encoding one or more CARs and/or the therapeutic agent, and the stimulus response element comprises at least one portion of the cGMP-specific 3′,5′-cyclic phosphodiesterase or a molecule derived of, for example, SEQ ID NO: 329.
[0337] 123. The modified cell or the method of embodiment 122, wherein expression of the one or more CARs and/or the therapeutic agent is ligand dependent.
[0338] 124. The modified cell or the method of embodiment 122, wherein expressed the one or more CARs and/or the therapeutic agent are destabilized or degraded in the absence of a corresponding ligand.
[0339] 125. The modified cell or the method of any one of embodiments 122-124, wherein modified cell comprises one or more nucleic acid sequences encoding at least one portion of the cGMP-specific 3′,5′-cyclic phosphodiesterase or a molecule derived of, for example, SEQ ID NO: 329 appended to or associated with the therapeutic agent such that expression of the therapeutic agent is ligand dependent, and the therapeutic agent is or comprises IL6 or IFN-γ, or a combination thereof.
[0340] 126. A fusion protein comprising a scFv binding PD-1 or PDL1, a linker, an extracellular domain, a transmembrane domain, and a cytoplasmic domain, wherein the transmembrane domain is selected from a group consist of a transmembrane domain of a receptor of IL15, IL2, IL7, IL6, IL12, IL18, IL21, IL23, IL 33, TNFα, TNFβ, IFNα, IFNγ, and IFNβ as well as siglec-15 antigen, and the cytoplasmic domain is selected from a group consist of a cytoplasmic domain of receptor of the receptor of IL15, IL2, IL7, IL6, IL12, IL18, IL21, IL23, IL 33, TNFα, TNFβ, IFNα, IFNγ, and IFNβ as well as siglec-15 antigen, and the extracellular domain is selected from a group consist of an extracellular domain of the receptor of IL15, IL2, IL7, IL6, IL12, IL18, IL21, IL23, IL 33, TNFα, TNFβ, IFNα, IFNγ, and IFNβ as well as siglec-15 antigen.
[0341] 127. A fusion protein comprising a scFv binding PD-1 or PDL1, a linker, a transmembrane domain, and a cytoplasmic domain, wherein the transmembrane domain is selected from a group consist of a transmembrane domain of a receptor of CD4, CD8, CD28, CD27, CD25, CD137, PD1 and PDL1 as well as siglec-15 antigen, and the cytoplasmic domain is selected from a group consist of a cytoplasmic domain of receptor of the receptor of CD4, CD8, CD28, CD27, CD25, CD137, PD1 and PDL1 as well as siglec-15 antigen.
[0342] 128. A fusion protein comprising a cytokine is selected from a group consist of IL15, IL2, IL7, IL6, IL12, IL18, IL21, IL23, IL 33, TNFα, TNFβ, IFNα, and IFNβ, a linker, an extracellular domain, a transmembrane domain, and a cytoplasmic domain, wherein the transmembrane domain is selected from a group consist of a transmembrane domain of the receptor of IL15, IL2, IL7, IL6, IL12, IL18, IL21, IL23, IL 33, TNFα, TNFβ, IFNα, IFNγ, and IFNβ as well as siglec-15 antigen, and the cytoplasmic domain is selected from a group consist of a cytoplasmic domain of receptor of the receptor of IL15, IL2, IL7, IL6, IL12, IL18, IL21, IL23, IL 33, TNFα, TNFβ, IFNα, and IFNβ, and the extracellular domain is selected from a group consist of an extracellular domain of the receptor of IL15, IL2, IL7, IL6, IL12, IL18, IL21, IL23, IL 33, TNFα, TNFβ, IFNα, and IFNβ.
[0343] 129. A fusion protein comprising a cytokine is selected from a group consist of IL15, IL2, IL7, IL6, IL12, IL18, IL21, IL23, IL 33, TNFα, TNFβ, IFNα, and IFNβ, a linker, a transmembrane domain, and a cytoplasmic domain, wherein the transmembrane domain is selected from a group consist of a transmembrane domain of a receptor of CD4, CD8, CD28, CD27, CD25, CD137, PD1 and PDL1 as well as siglec-15 antigen, and the cytoplasmic domain is selected from a group consist of a cytoplasmic domain of receptor of the receptor of CD4, CD8, CD28, CD27, CD25, CD137, PD1 and PDL1 as well as siglec-15 antigen.
[0344] 130. A fusion protein comprising a binding domain binding a ligand or a receptor of an immune checkpoint molecule and a docking molecule, wherein the immune checkpoint molecule is selected from the group consisting of programmed death 1 (PD-1), cytotoxic T lymphocyte antigen-4 (CTLA-4), B- and T-lymphocyte attenuator (BTLA), T cell immunoglobulin mucin-3 (TIM-3), lymphocyte-activation protein 3 (LAG-3), T cell immunoreceptor with Ig and ITIM domains (TIGIT), leukocyte-associated immunoglobulin-like receptor 1 (LAIRI), natural killer cell receptor 2B4 (2B4), VISTA (its receptor), and CD 160, and the docking molecule associates the binding domain with a cell.
[0345] 131. The fusion protein of embodiment 130, wherein the docking molecule comprises a linker, a transmembrane domain, and a cytoplasmic domain.
[0346] 132. The fusion protein of embodiment 131, wherein the transmembrane domain is selected from a group consist of a transmembrane domain of a receptor of IL15, IL2, IL7, IL6, IL12, IL18, IL21, IL23, IL 33, TNFα, TNFβ, IFNα, and IFNβ, and the cytoplasmic domain is selected from a group consist of a cytoplasmic domain of receptor of the receptor of IL15, IL2, IL7, IL6, IL12, IL18, IL21, IL23, IL 33, TNFα, TNFβ, IFNα, and IFNβ.
[0347] 133. The fusion protein of embodiment 131, wherein the docking molecule further comprises an extracellular domain.
[0348] 134. The fusion protein of embodiment 133, wherein the extracellular domain is selected from a group consist of an extracellular domain of the receptor of IL15, IL2, IL7, IL6, IL12, IL18, IL21, IL23, IL 33, TNFα, TNFβ, IFNα, and IFNβ.
[0349] 135. The fusion protein of embodiment 130, wherein the docking molecule comprises a linker, a transmembrane domain, and a cytoplasmic domain.
[0350] 136. The fusion protein of embodiment 135, wherein the transmembrane domain is selected from a group consist of a transmembrane domain of a receptor of CD4, CD8, CD28, CD27, CD25, CD137, PD1 and PDL1 as well as siglec-15 antigen, and the cytoplasmic domain is selected from a group consist of a cytoplasmic domain of receptor of the receptor of CD4, CD8, CD28, CD27, CD25, CD137, PD1 and PDL1 as well as siglec-15 antigen.
[0351] 137. The fusion protein of one of embodiments 130-136, wherein the binding domain is a scFv.
[0352] 138. The fusion protein of embodiment 130, wherein the binding domain is a scFv binding CD80 or CD86.
[0353] 139. The fusion protein of embodiment 138, wherein the docking molecule comprises or is wide type or modified CTLA4 or PD-1.
[0354] 140. The fusion protein of embodiment 130, wherein the binding domain is a scFv binding VISTA.
[0355] 141. The fusion protein of embodiment 140, wherein the docking molecule comprises or is wide type or modified VISTA receptor or PD-1.
[0356] 142. The fusion protein of embodiment 130, wherein the binding domain is a scFv binding PDL1or PD1, and/or the docking molecule comprises or is wide type or modified PD-1.
[0357] 143. The fusion protein of embodiment 130, wherein the binding domain is a scFv binding B7-H3.
[0358] 144. The fusion protein of embodiment 143, wherein the docking molecule comprises or is wide type or modified B7-H3 receptor or PD-1.
[0359] 145. A fusion protein comprising a therapeutic agent and a docking molecule, wherein the docking molecule comprises a cytoplasmic domain and a transmembrane domain that associate the therapeutic agent with a cell.
[0360] 146. The fusion protein of embodiment 142, wherein the therapeutic agent comprises or is the binding domain of one of embodiment 5-20 or the cytokine of one of embodiments 3 and 4.
[0361] 148. A nucleic acid sequence encoding the fusion protein of one of embodiments 1-22.
[0362] 147 A modified cell comprises the fusion protein of one of embodiments 126-148 or the nucleic acid sequence of embodiment 23.
[0363] 149. A pharmaceutical composition comprising the population of the modified cells of embodiment 24.
[0364] 150. A method of cause T cell response in a subject in need thereof and/or treating a tumor of the subject, the method comprising administering an effective amount of the composition of embodiment 24 to the subject.
[0365] 151. The pharmaceutical composition, the modified cell, and the method of one of embodiments 148-26, wherein the link is a GS linker.
[0366] 152. The pharmaceutical composition, the modified cell, and the method of one of embodiments 148-26, wherein the modified cell comprises a CAR.
[0367] 153. The pharmaceutical composition, the modified cell, and the method of one of embodiments 148-26, wherein the CAR comprises an extracellular domain, a transmembrane domain, and an intracellular domain, the extracellular domain binds an antigen.
[0368] 154. The pharmaceutical composition, the modified cell, and the method of one of embodiments 148-26, wherein the intracellular domain comprises a co-stimulatory domain that comprises an intracellular domain of a co-stimulatory molecule selected from the group consisting of CD27, CD28, 4-1BB, OX40, CD30, CD40, PD-1, ICOS, lymphocyte function-associated antigen-1 (LFA-1), CD2, CD7, LIGHT, NKG2C, B7-H3, and any combination thereof.
[0369] 155. The pharmaceutical composition, the modified cell, and the method of one of embodiments 148-26, wherein the antigen is Epidermal growth factor receptor (EGFR), Variant III of the epidermal growth factor receptor (EGFRvIII), Human epidermal growth factor receptor 2 (HER2), Mesothelin (MSLN), Prostate-specific membrane antigen (PSMA), Carcinoembryonic antigen (CEA), Disialoganglioside 2 (GD2), Interleukin-13Ra2 (IL13Rα2), Glypican-3 (GPC3), Carbonic anhydrase IX (CAIX), L1 cell adhesion molecule (L1-CAM), Cancer antigen 125 (CA125), Cluster of differentiation 133 (CD133), Fibroblast activation protein (FAP), Cancer/testis antigen 1B (CTAG1B), Mucin 1 (MUC1), Folate receptor-α (FR-α), CD19, FZD10, TSHR, PRLR, Muc 17, GUCY2C, CD207, CD3, CD5, B-Cell Maturation Antigen (BCMA), or CD4.
[0370] 156. The pharmaceutical composition, the modified cell, and the method of one of embodiments 126-31, wherein the fusion protein is regulated by an inducible gene expression system.
[0371] 157. A fusion protein comprising a cytokine and an oxygen-sensitive polypeptide domain.
[0372] 158. The fusion protein of embodiment 157, wherein the oxygen-sensitive polypeptide domain is s HIFI alpha, HIF3 alpha, or a sequencing having an identity of over 80%, preferably 90% or more preferably 95% with respectively Hif VHL-interaction domain or Hif amino acid 344-417 Hif amino acid 380-603.
[0373] 159. The fusion protein of embodiment 158, wherein the oxygen-sensitive polypeptide domain comprises HIF VHL binding domain.
[0374] 160. The fusion protein of embodiment 157, wherein HIFI alpha is hydroxylated by HIF aspecific prolyl hydroxylases (PHDI-3) which are oxygen sensing. Hydroxylation triggers poly-ubiquitylation of HIF1 alpha and targets the latter for proteosomal degradation by an E3 ubiquitin ligase. In hypoxia (low 0 2), occur an inhibition of hydroxylation via TCA cycle intermediates, a stabilization of the HIFa protein and an impairment of HIF transcriptional activity.
[0375] 161. A nucleic acid sequence encoding the fusion of any of embodiments 157-160 or comprising one or more components shown in FIG. 5.
[0376] 162. A modified cell comprising the fusion protein of any of embodiments 157-160 and/or the nuclei acid sequence of embodiments 161.
[0377] 163. The cell of embodiment 162, wherein the fusion protein is regulated by NFAT.
[0378] 164. A pharmaceutical composition comprising a population of the modified cells of any one of embodiments 162 and 163.
[0379] 165. A method of cause T cell response in a subject in need thereof and/or treating a tumor of the subject, the method comprising administering an effective amount of the composition of embodiment 164 to the subject.
[0380] 166. The modified cell, pharmaceutical composition or method of any one of embodiments 162-165, wherein the modified cell is lymphocyte, leukocyte, or PBMC; or cells, NK cells, or dendritic cells.
[0381] 167. The modified cell, pharmaceutical composition or method of any one of embodiments 162-166, wherein the modified cell further comprises a Chimeric antigen receptor (CAR) or a modified TCR.
[0382] 168. The modified cell, pharmaceutical composition or method of embodiment 167, wherein the TCR is modified TCR.
[0383] 169. The modified cell, pharmaceutical composition or method of embodiment 167, wherein the TCR is derived from spontaneously occurring tumor-specific T cells in patients.
[0384] 170. The modified cell, pharmaceutical composition or method of embodiment 167, wherein the TCR binds a tumor antigen.
[0385] 171. The modified cell, pharmaceutical composition or method of embodiment 170, wherein the tumor antigen comprises CEA, gp100, MART-1, p53, MAGE-A3, or NY-ESO-1, or the TCR comprises TCRγ and TORδ Chains or TCRα and TCRβ chains, or a combination thereof.
[0386] 172. The modified cell, pharmaceutical composition or method of claim 167, wherein the CAR comprises an extracellular domain, a transmembrane domain, and an intracellular domain, the extracellular domain binds an antigen.
[0387] 173. The modified cell, pharmaceutical composition or method of embodiment 172, wherein the intracellular domain comprises a co-stimulatory domain that comprises an intracellular domain of a co-stimulatory molecule selected from the group consisting of CD27, CD28, 4-1BB, OX40, CD30, CD40, PD-1, ICOS, lymphocyte function-associated antigen-1 (LFA-1), CD2, CD7, LIGHT, NKG2C, B7-H3, and any combination thereof.
[0388] 174. The modified cell, pharmaceutical composition or method of embodiment 173, wherein the antigen is Epidermal growth factor receptor (EGFR), Variant III of the epidermal growth factor receptor (EGFRvIII), Human epidermal growth factor receptor 2 (HER2), Mesothelin (MSLN), Prostate-specific membrane antigen (PSMA), Carcinoembryonic antigen (CEA), Disialoganglioside 2 (GD2), Interleukin-13Ra2 (IL13Rα2), Glypican-3 (GPC3), Carbonic anhydrase IX (CAIX), L1 cell adhesion molecule (L1-CAM), Cancer antigen 125 (CA125), Cluster of differentiation 133 (CD133), Fibroblast activation protein (FAP), Cancer/testis antigen 1B (CTAG1B), Mucin 1 (MUC1), Folate receptor-α (FR-α), CD19, FZD10, TSHR, PRLR, Muc 17, GUCY2C, CD207, CD3, CD5, B-Cell Maturation Antigen (BCMA), or CD4.
[0389] 175. The modified cell, pharmaceutical composition or method of any one of embodiments 162-174, wherein the modified cell or the T cells comprise an additional CAR binding a solid tumor antigen, and the CAR binds an antigen of a white blood cell.
[0390] 176. The modified cell, pharmaceutical composition or method of any one of embodiments 162-174, wherein the modified cell or the T cells comprise a dominant negative PD-1.
[0391] 177. The modified cell, pharmaceutical composition or method of any one of embodiments 162-174, wherein the modified cell or the T cells comprise a modified PD-1 lacking a functional PD-1 intracellular domain.
[0392] 178. The modified cell, pharmaceutical composition or method of any one of embodiments 162-177, wherein the modified cell further comprises a nucleic acid sequence encoding therapeutic agent.
[0393] 179. The modified cell, pharmaceutical composition or method of any one of embodiments 178, wherein the isolated nucleic acid sequence comprises a promoter comprising a binding site for a transcription modulator that modulates the expression and/or secretion of the therapeutic agent in the cell.
[0394] 180. The modified cell, pharmaceutical composition or method of embodiment 179, wherein the transcription modulator is or includes Hif1a, NFAT, FOXP3, and/or NFkB.
[0395] 181. The modified cell, pharmaceutical composition or method of embodiment 180, wherein the promoter is responsive to the transcription modulator.
[0396] 182. The modified cell, pharmaceutical composition or method of embodiment 180, wherein the promoter is operably linked to the nucleic acid sequence encoding the therapeutic agent such that the promoter drives expression and/or secretion of the therapeutic agent in the cell.
[0397] 183. The modified cell, pharmaceutical composition or method of embodiment 180, wherein expression of the therapeutic agent is regulated by an inducible gene expression system.
[0398] 184. The modified cell, pharmaceutical composition or method of embodiment 183, wherein the inducible gene expression system comprises or is a lac system, a tetracycline system, or a galactose system.
[0399] 185. The modified cell, pharmaceutical composition or method of embodiment 183, wherein the inducible gene expression system comprises or is a tetracycline system.
[0400] 186. The modified cell, pharmaceutical composition or method of embodiment 185, wherein the inducible gene expression system comprises or is a tetracycline on system, and an inducer is tetracycline, doxycycline, or an analog thereof.
[0401] 187. The modified cell, pharmaceutical composition or method of any one of embodiments 162-186, wherein the modified cell is a T cell derived from a primary human T cell isolated from a human donor.
[0402] 188. The modified cell, pharmaceutical composition or method of embodiment 187, wherein the cell has a reduced expression of endogenous TRAC gene.
[0403] 189. The modified cell, pharmaceutical composition or method of any one of embodiments 162-186, wherein the modified cell is a T cell derived from a primary human T cell isolated from a subject having cancer.
[0404] 190. A composition comprising a first population of cells comprising a first molecule binding a first antigen and a second population of cells comprising a second molecule binding a second antigen, wherein the second antigen is a tumor antigen and the first antigen and second antigen are different antigens, and the first population of cells and/or the second population of cells comprise a nucleic acid sequence encoding a therapeutic agent that is or comprises IL-6 or IFN-γ, or a combination thereof.
[0405] 191. The composition of embodiment 190, wherein the first molecule is a first CAR, and the second molecule is a second CAR; or the first molecule is the first CAR, and the second molecule is a TCR.
[0406] 192. The composition of embodiment 191, wherein the first population of cells does not comprise the second CAR, and/or the second population of cells does not comprise the first CAR.
[0407] 193. The composition of embodiment 192, wherein the composition further comprises a third population of cells comprising one or more nucleic acid sequences encoding the first CAR and the second CAR.
[0408] 194. The composition of embodiment 191, wherein:
[0409] the second population of cells comprises the first CAR, and the first population of cells do not comprise the second CAR; or
[0410] the first population of cells comprises the second CAR.
[0411] 195. The composition of embodiment 194, wherein second population of cells does not comprise the first CAR, and the first population of cells comprise the second CAR.
[0412] 196. A method of enhancing expansion of the second population of cells (cells targeting solid tumor), the method comprising administering an effective amount of the composition of one of embodiments 191-195 to a subject having a form of cancer associated with or expresses the tumor antigen.
[0413] 197. A method of enhancing T cell response in a subject or treating the subject having cancer, the method comprising administering an effective amount of the composition of one of embodiments 191-195 to the subject having cancer associated with or expresses the tumor antigen.
[0414] 198. A method of enhancing expansion of cells in a subject, the method comprising:
[0415] contacting cells with a first vector comprising a first nucleic acid sequence encoding the first CAR and a second vector comprising a second nucleic acid sequence encoding the second CAR to obtain the composition of one of embodiments 191-195; and
[0416] administering an effective amount of the composition to the subject having a form of cancer associated with or expresses the tumor antigen.
[0417] 199. A method of enhancing T cell response in a subject or treating the subject having cancer, the method comprising:
[0418] contacting cells with a first vector comprising a first nucleic acid sequence encoding the first CAR and a second vector comprising a second nucleic acid sequence encoding the second CAR to obtain the composition of one of embodiments 191-195; and
[0419] administering an effective amount of the composition to the subject having a form of cancer associated with or expresses the tumor antigen.
[0420] 200. A method of enhancing expansion of cells in a subject, the method comprising:
[0421] administering an effective amount of the first population of cells of one of embodiments 191-195; and
[0422] administering an effective amount of the second population of cells.
[0423] 201. The method of one of embodiments 196-200, wherein the first vector and the second vector comprise lentiviral vectors.
[0424] 202. The composition or the method of one of embodiments 190-201, wherein the first or second antigen is or comprises a surface molecule of a white blood cell (WBC), a tumor antigen, or a solid tumor antigen.
[0425] 203. The composition or the method of one of embodiments 190-201, wherein the cells are modified T cells, modified NK cells, or modified dendritic cells.
[0426] 204. The composition or the method of embodiment 202, wherein the WBC is a granulocyte, a monocyte, or lymphocyte.
[0427] 205. The composition or the method of embodiment 204, wherein the WBC is a B cell.
[0428] 206. The composition or the method of embodiment 205, wherein the cell surface molecule of the WBC is CD19, CD22, CD20, BCMA, CD5, CD7, CD2, CD16, CD56, CD30, CD14, CD68, CD11b, CD18, CD169, CD1c, CD33, CD38, CD138, or CD13.
[0429] 207. The composition or the method of embodiment 202, wherein the cell surface molecule of the WBC is CD19, CD20, CD22, or BCMA.
[0430] 208. The composition or the method of embodiment 202, wherein the cell surface molecule of the WBC is CD19.
[0431] 209. The composition or the method of embodiment 202, wherein the tumor antigen is a solid tumor antigen.
[0432] 210. The composition or the method of embodiment 202, wherein the solid tumor antigen is tMUC1, PRLR, CLCA1, MUC12, GUCY2C, GPR35, CR1L, MUC 17, TMPRSS11B, MUC21, TMPRSS11E, CD207, SLC30A8, CFC1, SLC12A3, SSTR1, GPR27, FZD10, TSHR, SIGLEC15, SLC6A3, KISS1R, QRFPR, GPR119, CLDN6, UPK2, ADAM12, SLC45A3, ACPP, MUC21, MUC16, MS4A12, ALPP, CEA, EphA2, FAP, GPC3, IL13-Rα2, Mesothelin, PSMA, ROR1, VEGFR-II, GD2, FR-α, ErbB2, EpCAM, EGFRvIII, B7-H3, or EGFR.
[0433] 211. The composition or the method of embodiment 202, wherein the solid tumor antigen is or comprises tumor associated MUC1.
[0434] 212. The composition or the method of one of embodiments 191-211, wherein the CAR comprises the antigen binding domain, a transmembrane domain, a co-stimulatory domain, and a CD3 zeta domain.
[0435] 213. The composition or the method of embodiment 212, wherein the co-stimulatory domain comprises the intracellular domain of CD27, CD28, 4-1BB, OX40, CD30, CD40, PD-1, ICOS, lymphocyte function-associated antigen-1 (LFA-1), CD2, CD7, LIGHT, NKG2C, B7-H3, a ligand that specifically binds with CD83, or a combination thereof.
[0436] 214. The composition or the method of embodiment 213, wherein:
[0437] a co-stimulatory domain of the second CAR comprises or is an intracellular domain of 4-1BB, and a binding domain of the second CAR binds TSHR; and/or
[0438] a binding domain of the first CAR binds CD19 and a co-stimulatory domain of the second CAR comprises or is an intracellular domain of CD28.
[0439] 215. The composition or the method of any one of embodiments 191-214, wherein the first population of cells and/or the second population of cells further comprise a dominant negative form of PD-1.
[0440] 216. The composition or the method of embodiment 215, wherein the first population of cells comprise a vector encoding the first CAR and the dominant negative form of PD-1.
[0441] 217. The composition or the method of one of embodiments 191-216, wherein the first CAR comprises a scFv binding TSHR, an intracellular domain of 4-1BB or CD28, CD3 zeta domain, and the second CAR comprises a scFv binding CD19, an intracellular domain of 4-1BB or CD28, CD3 zeta domain.
[0442] 218. The composition or the method of one of embodiments 191-217, wherein the first CAR comprises SEQ ID NO: 5, and the second CAR comprise the SEQ ID NO: 70.
[0443] 219. The composition or the method of one of embodiments 191-218, wherein the second population of cells comprises a lentiviral vector encoding the first CAR and a therapeutic agent and the first population of cells comprises a lentiviral vector encoding the second CAR and a dominant negative form of PD-1.
[0444] 220. The composition or the method of one of embodiments 191-219, wherein the first population of cells comprise the first CAR and a therapeutic agent and the second population of cells comprise the second CAR and a dominant negative form of PD-1.
[0445] 221. The composition or the method of one of embodiments 219 and 220, wherein the therapeutic agent comprises or is a cytokine.
[0446] 222. The composition or the method of embodiment 221, wherein the cytokine is IL6 and/or INFγ.
[0447] 223. A method comprising:
[0448] administering an effective amount of a first population of T cells comprising a CAR comprising a scFv binding CD19, an intracellular domain of 4-1BB or CD28, CD3 zeta domain to the patient, thereby enhancing expansion of the first population of T cells in the patient; and
[0449] administering an effective amount of a second population of T cells comprising a CAR comprising a scFv binding TSHR to a patient having cancer, an intracellular domain of 4-1BB or CD28, CD3 zeta domain.
[0450] 224. The method of embodiment 223, wherein first population of cells further comprise an additional CAR comprising the scFv binding tMUC1, the intracellular domain of 4-1BB or CD28, and the CD3 zeta domain.
[0451] 225. The method of embodiment 223, wherein the second population of cells does not comprise the scFv binding CD19.
[0452] 226. The method of embodiment 223, wherein the first population of cells does not comprise the scFv binding TSHR.
[0453] 227. The composition of embodiment 190, wherein the first molecule is a modified TCR.
[0454] 228. The composition of embodiment 227, wherein the TCR is derived from spontaneously occurring tumor-specific T cells in patients.
[0455] 229. The composition of embodiment 227, wherein the TCR binds a tumor antigen.
[0456] 230. The composition of embodiment 227, wherein the tumor antigen comprises CEA, gp100, MART-1, p53, MAGE-A3, or NY-ESO-1, or the TCR comprises TCRγ and TORδ Chains or TCRα and TCRβ chains, or a combination thereof.
[0457] 231. The modified cell, pharmaceutical composition or method of one of embodiments 190-230, wherein the modified cell is a T cell derived from a primary human T cell isolated from a human donor.
[0458] 232. The modified cell, pharmaceutical composition or method of embodiment 231, wherein the cell has a reduced expression of endogenous TRAC gene.
[0459] 233. The modified cell, pharmaceutical composition or method of one of embodiments 190-230, wherein the modified cell is a T cell derived from a primary human T cell isolated from a subject having cancer.
[0460] 234. The isolated nucleic acid sequence, the population of CAR cells, the pharmaceutical composition, or the method of one of embodiments 190-233, wherein the nucleic acid sequence comprises a first nucleic acid sequence encoding IL6 and a second nucleic acid sequence encoding IFN-γ, and the first nucleic acid sequence and the second nucleic acid sequence are connected by an IRES element or a third nucleic acid sequence encoding a 2A peptide.
[0461] 235. The isolated nucleic acid sequence, the population of CAR cells, the pharmaceutical composition, or the method of one of embodiments 190-234, wherein the nucleic acid sequence is or comprises the nucleic acid sequence encoding one or more amino acid sequences of SEQ ID NOs: 287 and/or 328, or a combination thereof.
[0462] 236. The isolated nucleic acid sequence, the population of CAR cells, the pharmaceutical composition, or the method of one of embodiments 190-235, wherein expression of the nucleic acid sequence is regulated by a conditional expression system such that the therapeutic agent is expressed in response to binding of a target antigen.
[0463] 48 The isolated nucleic acid sequence, the population of CAR cells, the pharmaceutical composition, or the method of one of embodiments 1-47, wherein expression of the additional nucleic acid sequence is regulated by SynNotch polypeptide.
[0464] 237. The isolated nucleic acid sequence, the population of CAR cells, the pharmaceutical composition, modified cell, or the method of one of embodiments 190-48, wherein T cell response is enhanced as compared to the administration of T cells that do not express or secrete the therapeutic agent, or the T cell response is enhanced as compared to the administration of CAR T cells without the administration of therapeutic agent.
[0465] 238. The isolated nucleic acid sequence, the population of CAR cells, the pharmaceutical composition, modified cell, or the method of one of embodiments 190-49, wherein expression and/or secretion of the therapeutic agent is regulated by an inducible expression system and/or the modified cell comprises a nucleic acid sequence encoding an inducible suicide system.
[0466] 239. The isolated nucleic acid sequence, the population of CAR cells, the pharmaceutical composition, modified cell, or the method of embodiments 190-49, wherein a range of concentration values of IL6 is 60 to 5000 pg/ml, 200-5000 pg/ml, or 2000-5000 pg/ml in the blood of the subject.
[0467] 240. The isolated nucleic acid sequence, the population of CAR cells, the pharmaceutical composition, modified cell, or the method of one of embodiments 190-49, wherein a range of concentration values IFN-γ is 20 to 5000 pg/ml, 200 to 5000 pg/ml, or 500 to 5000 pg/ml in the blood of the subject.
[0468] 241. The isolated nucleic acid sequence, the population of CAR cells, the pharmaceutical composition, modified cell, or the method of one of embodiments 190-235, wherein the modified cell comprises a nucleic acid sequence comprising a binding site for a transcription modulator that modulates the expression and/or secretion of the therapeutic agent in the cell.
[0469] 242. The isolated nucleic acid sequence, the population of CAR cells, the pharmaceutical composition, modified cell, or the method of embodiment 241, wherein the transcription modulator is or includes Hif1a, NFAT, FOXP3, and/or NFkB.
[0470] 55 The isolated nucleic acid sequence, the population of CAR cells, the pharmaceutical composition, modified cell, or the method of embodiment 53, wherein the promoter is responsive to the transcription modulator.
[0471] 243. The isolated nucleic acid sequence, the population of CAR cells, the pharmaceutical composition, modified cell, or the method of embodiment 241, wherein the promoter is operably linked to the nucleic acid sequence encoding the therapeutic agent such that the promoter drives 57 and/or secretion of the therapeutic agent in the cell.
[0472] 244. The isolated nucleic acid sequence, the population of CAR cells, the pharmaceutical composition, modified cell, or the method of one of embodiments 241-56, wherein the promoter comprises at least one of SEQ ID Nos: 332, 333, 341, 469, or 342.
[0473] 245. The isolated nucleic acid sequence, the population of CAR cells, the pharmaceutical composition, modified cell, or the method of one of embodiments 190-57, wherein the first and second population of cells comprises TSHR-CAR (scFv of the CAR: SEQ ID NO: 8): and hCD19-CAR-NATF-IL6-2A-IFNγ (scFv of CD19 CAR: SEQ ID 5, aa of NATF: SEQ ID: 469, aa of IL6: SEQ ID NO: 287, 2A is SEQ ID NO: 326, and aa of IFN-γ: SEQ ID NO: 327). SEQ ID NO: 287, 2A is SEQ ID NO: 327, and aa of IFN-γ: SEQ ID NO: 328).
[0474] 246. An isolated nucleic acid sequence comprising a nucleic acid sequence and an additional nucleic acid sequence, the nucleic acid sequence encoding a chimeric antigen receptor (CAR), the additional nucleic acid sequence encoding a therapeutic agent that is or comprises IL-6 or IFN-γ, or a combination thereof.
[0475] 247. A population of CAR cells comprising the nucleic acid sequence and the additional nucleic acid sequence of embodiments 246, wherein the CAR cells comprise lymphocyte, leukocyte, or PBMC.
[0476] 248. The population of CAR cells of embodiment 247, wherein the CAR and the therapeutic agent are produced in the form of a polyprotein, which is cleaved to generate separate CAR and therapeutic agent molecules.
[0477] 249. The population of CAR cells of one of embodiments 247-248, wherein the polyprotein comprises a cleavable moiety between the CAR and the therapeutic agent, the cleavable moiety comprises a 2A peptide, the 2A peptide comprises P2A or T2A, and/or the CAR and the therapeutic agent are each constitutively expressed.
[0478] 250. The population of CAR cells of one of embodiments 247-249, wherein the CAR cells comprise:
[0479] a third nucleic acid sequence encoding an additional CAR binding to an antigen that is different from an antigen that the CAR binds, or
[0480] the additional CAR binding a solid tumor antigen, and the CAR binds an antigen of a white blood cell.
[0481] 251. A pharmaceutical composition comprising the population of the CAR cells of one of embodiments 247-250.
[0482] 252. A method of causing T cell response in a subject in need thereof and/or treating a tumor of the subject, the method comprising administering an effective amount of the composition of embodiment 251 to the subject.
[0483] 253. The isolated nucleic acid sequence, the population of CAR cells, the pharmaceutical composition, or the method of one of embodiments 246-252, wherein the additional nucleic acid sequence comprises a first nucleic acid sequence encoding IL6 and a second nucleic acid sequence encoding IFN-γ, and the first nucleic acid sequence and the second nucleic acid sequence are connected by an IRES element or a third nucleic acid sequence encoding a 2A peptide.
[0484] 254. The isolated nucleic acid sequence, the population of CAR cells, the pharmaceutical composition, or the method of one of embodiments 246-253, wherein the additional nucleic acid sequence is or comprises the nucleic acid sequence of SEQ ID NOs: 287 or 328, or a combination thereof.
[0485] 255. The isolated nucleic acid sequence, the population of CAR cells, the pharmaceutical composition, or the method of one of embodiments 246-254, wherein expression of the additional nucleic acid sequence is regulated by a conditional expression system such that the therapeutic agent is expressed in response to binding of a target antigen.
[0486] 11 The isolated nucleic acid sequence, the population of CAR cells, the pharmaceutical composition, or the method of one of embodiments 1-10, wherein expression of the additional nucleic acid sequence is regulated by SynNotch polypeptide.
[0487] 256. A modified cell comprises one or more CARs, wherein the cell is engineered to express and secrete a therapeutic agent that is or comprises IL-6 or IFN-γ, or a combination thereof.
[0488] 257. A method of causing or enhancing T cell response, treating cancer, or enhancing cancer treatment, the method comprising: administrating an effective amount of the composition of T cells comprising one or more CARs, wherein the cell is engineered to express and secrete a therapeutic agent that is or comprises IL-6 or IFN-γ, or a combination thereof.
[0489] 258. A method of causing or enhancing T cell response, treating cancer, or enhancing cancer treatment, the method comprising:
[0490] administering an effective amount of the composition of a population of T cells comprising a CAR; and
[0491] administering an effective amount of a therapeutic agent that is or comprises IL-6 or IFN-γ, or a combination thereof.
[0492] 259. The modified cell or the method of one of embodiments 252, 257, and 258, wherein T cell response is enhanced as compared to the administration of T cells that do not express or secrete the therapeutic agent, or the T cell response is enhanced as compared to the administration of CAR T cells without the administration of therapeutic agent.
[0493] 260. The modified cell or the method of one of embodiments 256-259, wherein expression and/or secretion of the therapeutic agent is regulated by an inducible expression system and/or the modified cell comprises a nucleic acid sequence encoding an inducible suicide system.
[0494] 261. The modified cell or the method of one of embodiments 256-259, wherein a range of concentration values of IL6 is 60 to 5000 pg/ml, 200-5000 pg/ml, or 2000-5000 pg/ml in the blood of the subject.
[0495] 262. The modified cell or the method of one of embodiments 256-259, wherein a range of concentration values IFN-γ is 20 to 5000 pg/ml, 200 to 5000 pg/ml, or 500 to 5000 pg/ml in the blood of the subject.
[0496] 263. The modified cell or the method of one of embodiments 256-262, wherein the administering the effective amount of the therapeutic agent comprises intravenous delivery of an amount of human IL-6 in the range of about 0.5-50 ug per kilogram of body weight.
[0497] 264. The modified cell or the method of one of embodiments 256-263, wherein the modified cell or the T cells comprise an additional CAR binding a solid tumor antigen, and the CAR binds an antigen of a white blood cell.
[0498] 265. The modified cell or the method of embodiment 264, wherein the solid tumor antigen is tMUC 1, PRLR, CLCA1, MUC12, GUCY2C, GPR35, CR1L, MUC 17, TMPRSS11B, MUC21, TMPRSS11E, CD207, SLC30A8, CFC1, SLC12A3, SSTR1, GPR27, FZD10, TSHR, SIGLEC15, SLC6A3, KISS1R, QRFPR, GPR119, CLDN6, UPK2, ADAM12, SLC45A3, ACPP, MUC21, MUC16, MS4A12, ALPP, CEA, EphA2, FAP, GPC3, IL13-Rα2, Mesothelin, PSMA, ROR1, VEGFR-II, GD2, FR-α, ErbB2, EpCAM, EGFRvIII, PSCA, or EGFR, and the B cell antigen is CD19, CD20, CD22, or BCMA.
[0499] 266. The modified cell or the method of one of embodiments 256-265, wherein the modified cell or the T cells comprise a dominant negative PD-1.
[0500] 22. The modified cell or the method of one of embodiments 12-21, wherein the modified cell or the T cells comprise a modified PD-1 lacking a functional PD-1 intracellular domain.
[0501] 268. The isolated nucleic acid sequence, the population of CAR cells, the pharmaceutical composition, modified cell, or the method of one of embodiments 246-23, wherein the CAR comprises an extracellular domain, a transmembrane domain, and an intracellular domain, the extracellular domain binds an antigen.
[0502] 269. The isolated nucleic acid sequence, the population of CAR cells, the pharmaceutical composition, modified cell, or the method of one of embodiments 246-23, wherein the intracellular domain comprises a co-stimulatory domain that comprises an intracellular domain of a co-stimulatory molecule selected from the group consisting of CD27, CD28, 4-1BB, OX40, CD30, CD40, PD-1, ICOS, lymphocyte function-associated antigen-1 (LFA-1), CD2, CD7, LIGHT, NKG2C, B7-H3, and one combination thereof.
[0503] 270. The isolated nucleic acid sequence, the population of CAR cells, the pharmaceutical composition, modified cell, or the method of one of embodiments 246-24, wherein the antigen is Epidermal growth factor receptor (EGFR), Variant III of the epidermal growth factor receptor (EGFRvIII), Human epidermal growth factor receptor 2 (HER2), Mesothelin (MSLN), Prostate-specific membrane antigen (PSMA), Carcinoembryonic antigen (CEA), Disialoganglioside 2 (GD2), Interleukin-13Ra2 (IL13Rα2), Glypican-3 (GPC3), Carbonic anhydrase IX (CAIX), L1 cell adhesion molecule (L1-CAM), Cancer antigen 125 (CA125), Cluster of differentiation 133 (CD133), Fibroblast activation protein (FAP), Cancer/testis antigen 1B (CTAG1B), Mucin 1 (MUC1), Folate receptor-α (FR-α), CD19, FZD10, TSHR, PRLR, Muc 17, GUCY2C, CD207, CD3, CD5, B-Cell Maturation Antigen (BCMA), or CD4.
[0504] 271. The isolated nucleic acid sequence, the population of CAR cells, the pharmaceutical composition, modified cell, or the method of one of embodiments 246-25, wherein the therapeutic agent is present in the modified cell in a recombinant DNA construct, in an mRNA, or in a viral vector.
[0505] 272. The isolated nucleic acid sequence, the population of CAR cells, the pharmaceutical composition, modified cell, or the method of one of embodiments 246-26, wherein the modified cell comprises a therapeutic agent mRNA encoding the therapeutic agent, and the mRNA is not integrated into the genome of the modified cell.
[0506] 273. The isolated nucleic acid sequence, the population of CAR cells, the pharmaceutical composition, modified cell, or the method of one of embodiments 246-27, wherein the modified cell comprises a nucleic acid sequence comprising a promoter comprising a binding site for a transcription modulator that modulates the expression and/or secretion of the therapeutic agent in the cell.
[0507] 274. The isolated nucleic acid sequence, the population of CAR cells, the pharmaceutical composition, modified cell, or the method of embodiment 273, wherein the transcription modulator is or includes Hif1a, NFAT, FOXP3, and/or NFkB.
[0508] 275. The isolated nucleic acid sequence, the population of CAR cells, the pharmaceutical composition, modified cell, or the method of embodiment 273, wherein the promoter is responsive to the transcription modulator.
[0509] 276. The isolated nucleic acid sequence, the population of CAR cells, the pharmaceutical composition, modified cell, or the method of embodiment 273, wherein the promoter is operably linked to the nucleic acid sequence encoding the therapeutic agent such that the promoter drives expression and/or secretion of the therapeutic agent in the cell.
[0510] 277. The isolated nucleic acid sequence, the population of CAR cells, the pharmaceutical composition, modified cell, or the method of one of embodiments 273-276, wherein the promoter comprises at least one of SEQ ID Nos: 323-325.
[0511] 278. A method of using any one of the preceding embodiments (1-277) in autologous T cell therapy, allogenic T cell therapy, TCR T cell therapy, or NK cell therapy.
[0512] 279. The CAR described in any one of the preceding embodiments (1-278), wherein the CAR comprises one or more of the complementarity determining regions (CDRs) that binds an antigen of interest.

### EXAMPLES

### In Vivo Expansion and Treatment of Cancer

[0513] These clinical studies were designed to assess the safety and efficacy of infusing autologous T cells modified to express TSHR specific CAR/4-1BB/CD3-ζ into patients. On the first arm of the studies, patients received TSHR CAR T cells only. On the second arm, patients received CAR T cells directed to CD19 and TSHR. Autologous T cells modified to express TSHR specific CAR/4-1BB/CD3-ζ (TSHR CAR) and CD19 specific CAR/4-1BB/CD3-ζ (CD19 CAR) were infused into a patient. The modified T cell included T cells expressing TSHR CAR (single CAR), CD19 CAR (single CAR), and TSHR CAR&CD19 CAR, respectively (Double CAR). T cells of the patients were obtained, modified, and infused to the patients. T cell responses of patients from the first and second arms were measured and compared using the following protocols, which were approved by the hospitals where the trials were conducted. All patients were provided with written informed consent (SD: stable disease; PD: progressive disease; PR: partial remission; CR: complete remission; NR, no response).

TABLE 5

| | | | | Vectors | Safety or | |
|---|---|---|---|---|---|---|
| | | | | mixed | Adverse | |
| | Patient | Target | Infusion | with | reaction | |
| Cancer | ID | Marker | CART/kg | T cells | (AR) | Efficacy |
| Thyroid | 001 | TSHR | 0.11 × 10⁶ | Vectors | No | PR |
| cancer | | | | encoding | apparent | (day |
| | | | | TSHR- | AR | 29) |
| | | | | CAR & | | CR |
| | | | | vectors | | (day |
| | | | | encoding | | 64) |
| | | | | CD19- | | |
| | | | | CAR | | |
| Thyroid | 002 | TSHR | 0.11 × 10⁶ | Vector | No | NR |
| cancer | | | | encoding | apparent | |
| | | | | TSHR- | AR | |
| | | | | CAR | | |

### Manufacturing of CAR T Cells

[0514] PBMCs were obtained from patients. Various lentiviral vectors were generated and then transfected to the T cells, which were further cultured for several days before the co-cultivation assay. More information may be found in Table 6 below. Techniques related to cell cultures and cytotoxic T-lymphocyte assay may be found in “Control of large, established tumor xenografts with genetically retargeted human T cells containing CD28 and CD137 domains,” PNAS, Mar. 3, 2009, vol. 106 no. 9, 3360-3365, which is incorporated herein by reference in its entirety.

TABLE 6

| P's | | Infusion | |
|---|---|---|---|
| ID | Vectors and MOI | Methods | Pre-treatment |
| 001 | TSHR-CAR (CAR: SEQ ID NO: 279; | Fresh | FC regimen at −5 to −3 days |
| | scFy of the CAR: SEQ ID NO: 8): 19:1 | cells | (cyclophosphamide 500 mg/m2, |
| | hCD19-CAR-NATF-IL6-2A-IFNγ (scFv | | fludarabine 30 mg/m2) |
| | of CD19 CAR:SEQ ID 5, 6xNFAT: | | |
| | SEQ ID: 469, aa of IL6: SEQ ID NO: | | |
| | 287, 2A is SEQ ID NO: 326, and aa of | | |
| | IFN-γ: SEQ ID NO: 327 (See | | |
| | Embodiment 1 of FIG. 10)): 5:1 | | |
| 002 | TSHR-CAR (CAR: SEQ ID NO: 279; | Fresh | FC regimen at −5 to −3 days |
| | scFv of the CAR: SEQ ID NO: 8): 19:1 | cells | (cyclophosphamide 500 mg/m2, |
| | | | fludarabine 30 mg/m2) |

[0515] PBMCs were cultured using TEXMACS culture containing IL-2. CD4, and CD8 magnetic beads were used to sort and select T cells in the PBMCs. The appropriate starting culture amount was selected and TransAct activator was used to activate T cells. MACS® GMP T Cell TransAct™ includes a colloidal polymeric nanomatrix covalently attached to humanized recombinant agonists against human CD3 and CD28. Due to the nanomatrix MACS GMP T Cell TransAct can be sterile filtered and excess reagent can be removed by centrifugation and following conventional supernatant replacement or simply by medium wash. This reagent is suitable for use in automated culture systems, such as the CliniMACS Prodigy® Instrument. The number of corresponding carriers and the volume of the carrier were calculated according to the required carrier MOI (See Table 6). Various assays were performed to confirm the efficacy of these CAR T cells (e.g., a binding assay using flow cytometry and a killing assay using culturing assay with cells expressing TSHR/CD19), and quality assurance procedures were followed to ensure the safety of the administration of the CAR T cells to the patient.

[0516] FIG. 18 shows copy numbers of T cells expressing various proteins. Day 1, T cells from healthy donor were sorted and activated using CD3/CD28 beads. Day 2, 10⁵ cells were transfected with vectors 1230 (MOI 10:1), 6205 (hCD19CAR-GFP) (MOI 60:1), and 6221 (hCD19CAR-6×NFAT-IL6-2a-IFNg) (MOI 60:1), respectively. On Day 3, cell media were changed. On Day 4, cell numbers were counted. On Days 5, 6, and 8, assays for measuring culturing factors, CAR copy number, phenotype and expression were conducted. Day 8, toxicity assays were performed, and culturing factors were detected. The copy numbers are provided in Table 7 below. In this and the following examples, sequences for NFAT is SEQ ID NO 469; for TSHR-CAR is SEQ ID NO: 279; for scFv of TSHR CAR is SEQ ID NO: 8; for scFv of CD19 CAR is SEQ ID 5; for IL6 is SEQ ID NO: 287; for 2A is SEQ ID NO: 327; and for IFN-γ is SEQ ID NO: 328. Sequences of other components may be found in Table 2.

Table 7 shows copy numbers of CAR per CAR T cell.

| Type of T cells | 6205 | 6221 | 1230 |
|---|---|---|---|
| Day8/per CAR-T | 1.02728 | 0.66634 | 1.3325 |

[0517] FIG. 19 shows flow cytometry assay results of T cells expressing various proteins shown in FIG. 18. Day 0, peripheral blood of healthy volunteers was taken; CD3+ T cells were sorted; and CD3/CD28 Dynabeads were added in a 1:1 ratio. Day 2, T cells were transfected using lentivirus including various following vectors. CD19CAR was infected according to the infection ratio of M01=10:1; hCD19CAR, hCD19CAR-6×NFAT-GFP, hCD19CAR-6×NFAT-GFP, hCD19CAR-6×NFAT-IL6-2a-IFNg cells were infected according to the infection ratio of MOI=60:1. Day 3, the media were changed, the lentivirus were removed, and the cells were resuspended in fresh medium. Day 7, flow cytometry assays were used to detect CAR expression. CD19CAR is a humanized antibody and is therefore detected with a human CAR antibody. As shown in FIG. 19, CD19CAR expression was 23.99%; hCD19CAR-6×NFAT-GFP CAR expression was 25%; and hCD19CAR-6×NFAT-IL6-2a-IFNg CAR expression was 17.6%. Flow cytometry assay was performed using human CAR antibody to detect the expression intensity and expression level of CAR.

[0518] FIG. 20 shows IL6 release in response to CD3/CD28 Dynabeads activation. Day 0, peripheral blood of healthy volunteers was taken, CD3+ T cells were sorted, and CD3/CD28 Dynabeads were added at a 1:1 ratio. Day 2, T cells were transfected using lentivirus including various following vectors. CD19CAR was infected according to the infection ratio of MOI=10:1; hCD19CAR, hCD19CAR-6×NFAT-GFP, hCD19CAR-6×NFAT-GFP, hCD19CAR-6×NFAT-IL6-2a-IFNg cells were infected according to the infection ratio of MOI=60:1. Day 3, the media were changed, and the lentiviruses were removed, and the cells were resuspended in fresh medium. DAY 5, 6, and 8, the cell supernatant in 200 ul culture was used to detect the release of IL6. As shown in FIG. 20, on Day 5, 6, and 8, the cell supernatant of 200 ul was taken from the media and the release of IL6 factor was detected. The amount of IL6 released per 10 e4 of CD19CAR and CD19CAR-6×NFAT-GFP was 0-10 pg/ml on Day 5, 6, and 8. 10 e4 CD19CAR-6×NFAT-IL6-2A-IFNg had IL6 release of 498 pg/ml and 378 pg/ml on Day 5 and 6, and the released amount of IL6 on Day 8 was 9.8 pg/ml. On Days 5 and 6, cells were cultured with CD3/CD28 Dynabeads such that the cells were activated, and NFAT element was activated and the transcription of IL6 was enabled, causing IL6 to be released. However, on Day 8, the effect of Dynabeads stimulation was dropped to a lower level, and the cells were not activated. Therefore, the NFAT element was turned off and the transcription of IL6 was disabled. Thus, IL6 was not released. When T cells are stimulated by CD3/28 Dynabeads, the cells are activated for a short period of time. The NFAT element induces transcriptional translation of the gene in response to the activation, and the corresponding genes are expressed. When the cells are at rest or at a lower level of activation, the NFAT element does not initiate transcriptional translation of the gene of interest. Therefore, whether the NFAT element is active or not and whether the induced gene is expressed can be judged by the expression of the target gene in the activated and inactivated state of the CART cell.

[0519] FIG. 21 shows IL6 release in response to co-culturing with Nalm6 cells (See Table below). The cells were cultured to Day 8 and then were leveled with NT cells to differentiate the CAR ratio of CD19CAR T cells and CD19CAR-6×NFAT-GFP to cells of CD19CAR-6×NFAT-IL6-2a-IFNg. 10 e4 CAR+ cells were co-cultured with 10 e4 Nalm-6 cells or cultured separately. After 24 H, the supernatant was collected and the amount of IL6 released was measured. The cells were co-cultured with Nalm6 cells and were in an activated state. Thus, the NFAT element initiated transcription of IL6 in an activated state, allowing IL6 to be released. When the CAR T cells are co-cultured with the target cells, since the CAR T cells recognize the membrane proteins on the surface of the tumor cells, the cells are activated. The NFAT element initiates transcriptional translation of the gene in response to activation. The corresponding gene is expressed. When the cell is at rest or the activation level is low, the NFAT element does not initiate transcriptional translation of the gene of interest. Therefore, whether the NFAT element is active or not and whether the induced gene is expressed can be determined by the expression of the target gene in the activated and inactivated state of the CAR T cell.

TABLE 8

| | | CD19CAR- | CD19CAR-6xNFAT- |
|---|---|---|---|
| CAR T cells 10e4 | CD19CAR-T | 6xNFAT-GFP | 1L6-2a-1FNg |
| Co-cultured cells (25 | Nalm6 | Nalm6 | Nalm6 |
| hours) 10e4 | | | |
| IL6 released: CART | 0-10 pg/m1 | 0-10 pg/m1 | 260 pg/m1 |
| cells co-cultured with | | | |
| Nalm6 | | | |
| IL6 released: CAR T | 0-10 pg/m1 | 0-10 pg/m1 | 0-10 pg/m1 |
| cells cultured alone | | | |

[0520] FIG. 22 shows IFNγ (i.e., IFNg) release in response to CD3/CD28 Dynabeads activation. On day 0, peripheral blood of healthy volunteers was taken, CD3+ T cells were sorted, and CD3/CD28 Dynabeads were added in a 1:1 ratio. On Day 2, T cells were transfected using lentivirus including various following vectors. CD19CAR T cells were infected according to the infection ratio of MOI=10:1; hCD19CAR, hCD19CAR-6×NFAT-GFP, hCD19CAR-6×NFAT-GFP, hCD19CAR-6×NFAT-IL6-2a-IFNg cells were infected according to the infection ratio of MOI=60:1. The lentivirus was removed, and the cells were resuspended in fresh medium. On DAY 5, 6, and 8, 200 ul of the cell supernatant was used to detect the release of IFNγ. On Days 5 and 6, cells were cultured with CD3/CD28 Dynabeads such that the cells were activated, and NFAT element was activated which enabled the transcription of IFNγ and the release of IFNγ. However, on Day 8, the effect of Dynabeads stimulation has dropped to a lower level, and the cells were no longer activated. Therefore, the NFAT element was turned off andtranscription of IFNγ was disabled. Thus, IFNγ was not released. When T cells are stimulated by CD3/28 Dynabeads, the cells are activated for a short period of time. The NFAT element causes transcriptional translation of the gene in response to the activation, and the corresponding genes are expressed. When the cells are at rest or at a lower level of activation, the NFAT element does not initiate transcriptional translation of the gene of interest. Therefore, whether the NFAT element is active or not and whether the induced gene is expressed can be determined by the expression of the target gene in the activated and inactivated state of the CAR-T cell.

[0521] FIG. 23 shows IFNγ release in response to co-culturing with Nalm6 cells (See Table below). The cells were cultured to Day 8 and then were leveled with NT cells to differentiate the CAR ratio of CD19 CAR T cells and CD19CAR-6×NFAT-GFP to cells of CD19CAR-6×NFAT-IL6-2a-IFNg. 10 e4 CAR+ cells were co-cultured with 10 e4 Nalm-6 cells or cultured separately. After 24 hrs, the supernatant was collected, and the amount of IFNγ released was measured. The cells were co-cultured with Nalm6 cells and were in an activated state. Thus, the NFAT element initiated transcription of IFNγ in an activated state, allowing IFNγ to be released. When the CAR T cells are co-cultured with the target cells, the cells are activated because the CAR T cells recognize the membrane proteins on the surface of the tumor cells. The NFAT element initiates transcriptional translation of the gene to be expressed due to the activation. The corresponding gene is expressed. When the cell is at rest or the activation level is low, the NFAT element does not initiate transcriptional translation of the gene of interest. Therefore, whether the NFAT element is active or not and whether the induced gene is expressed can be determined by the expression of the target gene in the activated and inactivated state of the CAR T cell.

TABLE 9

| | | | CD19CAR- |
|---|---|---|---|
| | | CD19CAR- | 6xNFAT- |
| CAR T cells 10e4 | CD19CAR-T | 6xNFAT-GFP | IL6-2a- IFNγ |
| Co-cultured cells (25 | Nalm6 | Nalm6 | Nalm6 |
| hours) 10e4 | | | |
| IFNy released: CAR T | 2400-3200 | 2400-3200 pg/ml | 7900 pg/ml |
| cells co-cultured with | pg/m1 | | |
| Nalm6 | | | |
| IFNγ released: CAR T | 2400-3200 | 2400-3200 pg/ml | 2400-3200 pg/ml |
| cells cultured alone | pg/ml | | |

[0522] FIG. 24 shows toxicity assay with respect to CAR T cells. T cells from a healthy donor were cultured to Day 8 and then were leveled with NT cells to differentiate the CAR ratio of CD19 CAR T cells and CD19CAR-6×NFAT-GFP to cells of CD19CAR-6×NFAT-IL6-2a-IFNg. 30 e4 CAR+ cells were co-cultured with 10 e4 Nalm-6 cells and 90 e4 Nalm-6 cells, respectively. The residual of Nalm6 cells was detected after 24 hrs. CD19CAR T cells, CD19CAR-6×NFAT-GFP cells, and CD19CAR-6×NFAT-IL6-2a-IFNg cells were co-cultured with Nalm6 cells in different ratios. There were no significant differences among the 3 cell groups. After the cells of CD19CAR, CD19CAR-6×NFAT-GFP and CD19CAR-6×NFAT-IL6-2a-IFNg were activated by the tumor, the T cells executed a killing function and acted on the target cells to cause the target cells to be killed.

[0523] FIGS. 25 and 26 show other IFNγ release in response to co-culturing with Nalm6 cells. Day 0, peripheral blood T cells were obtained from volunteer and stimulated using Dynabeads at 1:1 ratio. Day 1 the cells were infected with lentiviral vectors. Day 2, the media were changed. Day 7 flow cytometry assays were used to detected CAR expression and CAR copy numbers. 1204 represents hCD19CAR cells, and 6107 represents hCD19CAR-2A-IL12 cells which express IL12 continuously. The CAR expression was normalized to 17%. 10 e4 CAR positive cells and 10 e4 Nalm6 or Nalm6-PDL1 tumor cells were co-cultured in 24-well plates for 24 h, and the supernatant was assayed for IFNγ. 1204 had 42% CAR expression and 1.5 copies per CAR T cell, and 6107 had 23% CAR expression and 0.94 copies per CAR T cell. CAR was normalized to 17% for co-culture. Co-culture results, as shown in the histogram, showed that IFNγ produced by Nalm6-PDL1 stimulation for 1204 was about half that stimulated by Nalm6 wt because of the inhibitory effect of PDL1 on T cells. The release of IFNγ from 6107 reached about 10 times that of 1230, demonstrating that IL12 released by CAR T significantly promoted IFNγ release.

[0524] FIGS. 27 and 28 show IL12 and IFNγ release in response to CD3/CD28 Dynabeads activation. Day 0, peripheral blood T cells were obtained from volunteer and stimulated using Dynabeads at 1:1 ratio. Day 1, the cells were infected with lentiviral vectors. Day 2, the media were changed. On day 9, flow cytometry was used to detect CAR expression. 1230 represents h19CAR, and 6209 represents h19CAR-6×NFAT-IL12 (conditional release of IL12 under T cell activation). The CAR expression was normalized to 30%. The same number of cells were stimulated by Dynabeads for 24 hrs at a ratio of 1:3, and the supernatant was assayed for IL12 and IFNγ. There was 65% CAR expression in 1230 and 34% CAR expression in 6209. After normalized to 30%, add Dynabeads. After 24 hrs, the supernatant was assayed to collect information of cytokines and results were presented as a histogram. Under the stimulation of Dynabeads, 6209 released an average of 55 pg of IL12 per 10×⁴ of T cells. 1230 did not release IL12 regardless of stimulation, and 6209 did not release IL12 without stimulation. This indicates that, originally, NFAT activated IL12 transcription under Dynabeads stimulation, as shown on the left. IFN was released as shown on the right. Both CAR T cells were free of IFNγ release without stimulation, and 6209 released more IFNγ under Dynabeads stimulation, indicating that IL12 synergizes with 6209CART cells to release more IFNγ.

[0525] FIGS. 29 and 30 show IL6 and IFNγ release in response to CD3/CD28 Dynabeads activation. Day 0, peripheral blood T cells were obtained from volunteer and stimulated using Dynabeads at 1:1 ratio. Day 1, the cells were infected with lentiviral vectors. Day 2, the media were changed. On day 7, flow cytometry was used to detect CAR expression. 1230 represents hCD19CAR, and 6221 represents hCD19CAR-6×NFAT-IL6-2A-IFNγ (conditional release of IL6 and IFNγ under T cell activation). The CAR expression was normalized to 12.66%. The same number of cells were stimulated by Dynabeads for 24 hrs at a ratio of 1:3, and the supernatant was assayed for IL6 and IFNγ. There was 67% CAR expression in 1230, and 29% CAR expression in 6221. The CAR expression was normalized 12.66% and the cells were added Dynabeads. After 24 hrs, the supernatant was assayed to collect information of cytokines and results were presented as a histogram. Both cells were free of IL6 or IFNγ release without Dynabead activation. After addition of Dynabeads, 6221 significantly released more IL6 and IFNγ (based on the average number of pg released per 10 e4 T cells).

### Cell Expansion and Treatment of Cancer

[0526] For fresh cells, after removing the magnetic beads, the transduced cells were centrifuged or replaced with a solution of 95% compound electrolyte injection of 5% human albumin, loaded into a return bag, and transported at 15-25 ° C. after sealing. Fresh preparations were returned directly. For Cryopreserved cells, the transduced cells were transferred to the media including a compound electrolyte injection of 33.75% human albumin 25% dextran 40 glucose injection 33.75% DMSO 7.5%. The cell suspension was loaded into a cryopreservation bag and then the procedure was cooled to −90 ° C. and transferred to a gas phase liquid nitrogen tank for storage. The reconstitution of the frozen preparations was completed within 30 minutes after resuscitation. Peripheral blood mononuclear cells (PBMCs) were obtained from patients by leukapheresis for CAR T cell preparation, and the first day of CAR T infusion was set as study day 0.

[0527] Patients were given a conditioning treatment for lymphodepletion. Fludarabine- and cyclophosphamide-based conditioning treatment varied according to the tumor burden in the bone marrow (BM) and peripheral blood (PB). CAR T cells were transfused to patients. Each day CAR T cells were transported to the hospital, washed, counted, checked for viability and then prepared for administration to patients, who were then observed closely for at least 2 hours. Cytokine Release Syndrome (CRS) was graded according to a revised grading system (See Lee D W. et al, Blood 2014;124:188-95). Other toxicities during and after therapy were assessed according to the National Institutes of Health Common Terminology Criteria for Adverse Events Version 4.0 (http://ctep.cancer.gov/). Therapy responses were assessed by flow cytometry and morphological analysis. When possible, patients were assessed by chimeric gene expression levels. The response type was defined as minimal residual disease (MRD) negative, complete response, complete response with incomplete count recovery, stable disease, and progressive disease.

[0528] Serial BM and PB samples after CAR T cell infusion were collected in K2EDTA BD vacutainer tubes (BD). The persistence of CD19CAR T cells from fresh PB and BM in patients was determined by FACS. Circulating CAR T cell numbers per μl were calculated on the basis of measured absolute CD3+ T lymphocyte counts. Simultaneously, CAR DNA copies were evaluated as another method of determining CAR T cell expansion and persistence. Genomic DNA was extracted using a QIAamp DNA Blood Mini Kit (Qiagen) from cryopreserved PB and BM. CAR DNA copies were assessed by quantitative real-time PCR as described in the supplementary materials. The levels of cytokines IFN-γ, TNF-α, IL-4, IL-6, IL-10, IL-17, etc. in serum and CSF were measured in a multiplex format according to the manufacturer's instructions (See FIGS. 12-15 and 16 as well as 17). On Day 64, MRI sweep scanning (1.5T) and then enhanced scanning (1.5T) were performed to evaluate CART therapy on patient 001. Patient 001 had undergone thyroidectomy. The MRI images showed that there was no clear tumor recurrence or recurrence in the surgical area. Thyroid cancer changed the bilateral thyroid surgery area after surgery, and no abnormal MR signal was observed in the area. After the scanning signal is enhanced, no abnormal enhancement signal is observed in the above areas. The double neck II and III areas showed multiple small lymph nodes with a maximum short diameter of no more than 10 mm. There were no abnormalities in the bilateral submandibular gland morphology and MR signal. At the same time, the cervical spinal cord morphology and MR signal were not abnormal. It appeared that patient has achieved complete remission (CR). FIG. 16 shows various parameters of the patient in response to CAR T cell infusion in a patient. FIG. 17 shows various parameters of the patient in response to CAR T cell infusion in another patient. These results demonstrate that T cells expressing CD19 CAR and TSHR CAR expanded more and released more cytokines (e.g., IL-6 an IFN-γ) than T cells expressing only the TSHR CAR.

[0529] As for Patient 002, after cell infusion, while the patient did not have any adverse reaction, no apparent response (e.g., disappearance or shrink of target lesions) was observed. As for Patient 001, 29 days after the infusion, the right tumor disappeared, and the size of the left tumor reduced (See FIG. 11). These results demonstrate that T cells expressing CD19 CAR, TSHR CAR, and IL6/IFNγ enhanced or inhibited the growth of thyroid cancer. During the treatment, no severe CRS (no greater than level 2) was observed in Patient 001. This demonstrated that infusion of CAR T cells expressing and secreting IL-6 did not cause severe CRS for treating solid tumors.

[0530] Genomic DNA was extracted using a QIAamp DNA Blood Mini Kit (Qiagen) from cryopreserved peripheral blood and bone marrow. Quantitative PCR (qPCR) was performed in real-time in triplicates using the ABI 2×TaqMan Universal Master Mix with AmpErase UNG (Applied Biosystems) in a 7500 real-time PCR system (Applied Biosystems). Copy numbers per microgram of genomic DNA were calculated from a standard curve of 10-fold serial dilutions of purified CAR plasmid containing 102-108 copies/μL. Amplification of an internal control gene was used for normalization of DNA quantities (See FIG. 16). Primers/probes specific for the CAR19 transgene and an internal control gene were as previously described (see Gökbuget N. et al., Blood 2012;120:2032-41 and O'Brien S. et al, J Clin Oncol 2013;31:676-83).

### Cells Expressing Chimeric Receptors Establish Antitumor Effects in Patients with Relapsed/Refractory Acute Lymphocytic Leukemia

[0531] This clinical trial was designed to assess the safety and efficacy of infusing autologous T cells modified to express CD19 specific CAR/4-1BB/CD3-ζ into Chinese patients with R/R ALL. The inclusion criteria were as follows: 1) age not more than 60 years; 2) relapsed or refractory CD19+ ALL; 3) relapsed allo-HSCT without evidence of graft versus host disease (GVHD) and not requiring immunosuppression therapy; and 4) measurable disease and adequate performance status and organ function. Patients with central nervous system leukemia (CNSL) were ineligible. The protocol was approved by the Institutional Review Board. All patients provided written, informed consent.

[0532] The single chain fragment variable (scFv) sequence specific for CD19 was derived from Clone FMC63 (See Zola H. et al, Immunol Cell Biol 1991;69:411-22.). The 4-1BB co-stimulatory domain, CD3ζ signaling domain and hinge and transmembrane domain were generated. CART19-4-1BB vectors harboring anti-CD19 scFv (SEQ ID: 6) and the human 4-1BB and CD3ζ signaling domains were cloned into a lentiviral backbone as previously described (See Hu Y. Journal of Hematology & Oncology 2016; 9: 70).

[0533] Lentivirus was produced by transfecting 293T cells with CART19-4-1BB vectors and viral packaging plasmids which were frozen in −80° C. and thawed immediately before transduction. The lentivirus supernatant was harvested. CD3+ T cells were isolated and activated as described (See Kalos M. et al, Sci Transl Med 2011; 3:95ra73). The cells were then cultured in X-VIVO 15 medium (Lonza) containing 100 U/ml interleukin-2 (IL-2) and transduced with lentivirus supernatant at high multiplicity of infection (MOI) from 5:1 to 10:1 within 24-48 hours. The CAR transduced T cells (CD19-CAR T cell, thereafter “CART19”) were obtained and cultured for 11 days. Three days before administration, fresh culture media were replaced. After that, no manipulation was conducted to the cells until transportation for infusion. The transduction efficiency was evaluated by flow cytometry (FACS) on day 5-7 after lentivirus transduction. The following anti-human antibodies were used: anti-hCD45 APC (BD Bioscience), anti-hCD3 FITC (BD Bioscience), biotin-labeled goat-anti-mouse IgG specific for F(ab′)2 fragment (Jackson immuno-Research, Cat #115-065-072) and PE streptavidin (BD Bioscience). Data acquisition was performed using a CytoFLEX flow cytometer (Beckman).

[0534] Prior to CD19CAR T infusion, FACS analysis of transduction efficiency and in vitro cytotoxicity assays of CD19 CAR T were performed for each patient as described herein. Additionally, CD19CAR T cultures were checked twice for possible contaminations by fungus, bacteria, mycoplasma, chlamydia and endotoxin. Peripheral blood mononuclear cells (PBMCs) were obtained from patients by leukapheresis for CD19CAR T preparation on day 8, and the first day of CD19CAR T cell infusion was set as study day 0. Patients were given a conditioning treatment for lymphodepletion. Fludarabine- and cyclophosphamide-based conditioning treatment varied according to the tumor burden in the bone marrow (BM) and peripheral blood (PB). CD19CAR T cells were transfused directly to patients in escalating doses over a period of 3 consecutive days without any premedication. Each day CD19CAR T cells were transported to hospital, washed, counted, checked for viability and then prepared for administration to patients, who were then observed closely for at least 2 hours. CRS was graded according to a revised grading system (See Lee D W. et al, Blood 2014; 124:188-95). Other toxicities during and after therapy were assessed according to the National Institutes of Health Common Terminology Criteria for Adverse Events Version 4.0 (http://ctep.cancer.gov/). Therapy responses were assessed by flow cytometry and morphological analysis. When possible, patients were assessed by chimeric gene expression levels. The response type was defined as minimal residual disease (MRD) negative, complete response, complete response with incomplete count recovery, stable disease and progressive disease.

[0535] Serial BM and PB samples after CD19CAR T cell infusion were collected in K2EDTA BD vacutainer tubes (BD). The persistence of CD19CAR T cells from fresh PB and BM in patients was determined by FACS. Circulating CD19CAR T cell numbers per pl were calculated on the basis of measured absolute CD3+ T lymphocyte counts. Simultaneously, CAR DNA copies were evaluated as another method of determining CD19CAR T cell expansion and persistence. Genomic DNA was extracted using a QIAamp DNA Blood Mini Kit (Qiagen) from cryopreserved PB and BM. CAR DNA copies were assessed by quantitative real-time PCR as described in the supplementary materials.

[0536] The levels of cytokines such as IFN-γ, TNF-α, IL-4, IL-6, IL-10, IL-17, etc. in serum and CSF were measured in a multiplex format according to the manufacturer's instructions. Comparisons of continuous variables and risk factors that may influence variations in grade 3 or 4 CRS development were compared using the Mann-Whitney U test for 2 groups. Fisher's exact test was used to evaluate the influence of categorical variables on grade 3 CRS between 2 groups. Correlations were calculated using a rank-based Spearman test. Overall survival (OS) and leukemia-free survival (LFS) probabilities were determined by the Kaplan-Meier method using all enrolled patients to determine OS and those with MRD-negative responses for LFS. All quoted P values are two sided, and P values less than 0.05 were considered statistically significant.

[0537] CD19+-RFP and Red Fluorescent Protein (RFP) were lentivirally transduced into K562 to produce CD19-RFP-K562 cells and K562-RFP cells, respectively. The cytotoxic activity of the CD19CAR T cells was measured before infusion by co-culture with the target cells, CD19-RFP-K562 cells or K562-RFP cells, at varying ratios of effector cell to target cell (E:T). The target cells were plated into 96-well microwell plates (Nunc) at 10⁴ cells per well in 50 μl of RPMI 1640 media supplemented with 10% FBS (Gibco). The CD3/CD28 beads were removed, and effector T cells were mixed with target cells in the wells at the indicated E:T ratio. The total volume was 200 μl per well. After 24 hrs of incubation, the cells were pipetted up and down in the 96-well microwell plates with a multi-channel pipettor to dissociate the cells into single-cell suspensions. The surviving RFP target cells in each well were photographed, and the number of surviving RFP target cells was counted and compared with those in the wells without effector cells. The cell death rate was calculated as (control-sample)/controlx100%. Supernatants were also collected and quantified using the human IFN-γ Valukine ELISA Kit (R&D systems).

[0538] Genomic DNA was extracted using a QIAamp DNA Blood Mini Kit (Qiagen) from cryopreserved peripheral blood and bone marrow. Quantitative real-time PCR was performed in triplicate using the ABI 2× TaqMan Universal Master Mix with AmpErase UNG (Applied Biosystems) in a 7500 real-time PCR system (Applied Biosystems). Copy numbers per microgram of genomic DNA were calculated from a standard curve of 10-fold serial dilutions of purified CAR plasmid containing 102-108 copies/μL. Amplification of an internal control gene was used for normalization of DNA quantities. Primers/probes specific for the CART19 transgene and an internal control gene were as previously described (See Gökbuget N. et al., Blood 2012; 120:2032-41 and O'Brien S. et al, J Clin Oncol 2013; 31:676-83).

[0539] Therapy response was assessed by flow cytometry and morphology. When possible, chimeric gene expression levels were assessed in the patients. The response type was defined as MRD-negative, complete response, complete response with incomplete count recovery, stable disease and progressive disease, as previously described. MRD-negative was defined as less than 0.01% marrow blasts by flow cytometry. Complete response was defined as less than 5% marrow blasts, absence of circulating blasts, and no extramedullary sites of disease with absolute neutrophil counts of 1000 per μL or more and platelets 100,000 per μL or more. Complete response with incomplete count recovery was defined as a complete response with cytopenia. Stable disease was defined as disease that did not meet the criteria for complete response, complete response with incomplete count recovery, or progressive disease. Progressive disease was defined as worse M status or no change in M status but a greater than 50% increase in absolute peripheral blast count. After CART19 therapy, patients were followed up every week and underwent bone marrow examination including morphology, MRD status, chimeric gene expression and a CART cell count every 4 weeks.

[0540] The samples were collected in gel tubes and stored at 4° C. until centrifugation later the same day. All blood and CSF samples were then centrifuged at 5000 rpm for 6 minutes. The supernatants were transferred for subsequent analysis. The BD Cytometric Bead Array Human Th1/Th2/Th17 Cytokine Kit (BD Biosciences), FCAP Array v3.0 software (BD Biosciences), and a BD FACS CANTO II (BD Biosciences) were used for the measurement and analysis of the concentrations of the cytokines such as IL-2, IL-4, IL-6, IL-10, IL-17A, IFN-γ, and TNF-α et al., according to the manufacturer's instructions.

[0541] Erythrocyte-lysed whole BM samples were used for immunophenotyping on the day of bone marrow aspiration. Antigen expression of blast cells was systematically analyzed by flow cytometry (FACSCalibur flow cytometer, BD Biosciences, San Jose, Calif.) using four-color combinations of monoclonal antibodies (mAbs) with fluorescein isothiocyanate (FITC), phycoerythrin (PE), allophycocyanin (APC), and phycoerythrin-cyanin 7 (PE-Cy7). Cell-Quest software (Becton Dickinson Biosciences) was used for data analysis. Monoclonal antibodies were purchased from the following manufacturers: BD Biosciences, CD10-APC, CD19-FITC, CD22-PE, CD34-PE, CD45-PE-Cy7, cyCD79a-PE, surface immunoglobulin (slg) M-PE, cytoplasmic immunoglobulin (clg) M-APC; Beckman Coulter, CD20-APC, slg-Lamda-FITC, slg-Kappa-APC.

[0542] For the investigation of Minimal residual disease (MRD), the combination of mAbs was based on the aberrant phenotypes of leukemic blasts at diagnosis individually, and at least 500,000 events were acquired. The MRD result was presented as the percentage of cells with aberrant phenotypes among nucleated cells. A sensitivity of 0.01% was achieved in all samples analyzed. The instrument setup was calibrated daily by analyzing Calibrite™ beads and standard blood samples (BD™ Multi-Check Control from BD Biosciences or CD-chex™ Plus from Streck, Inc.) for quality control.

[0543] Three patients with relapsed/refractory Chronic Lymphocytic Leukemia (r/r ALL) were treated with CD19-CAR T cells. Results are summarized below in Tables 10-13. These results demonstrate that T cells expressing CD19 CAR establish antitumor effects in patients with r/r ALL. In addition, IL-6 and IFNγ were significantly elevated in the blood of three patients after transmission of CD19 CART cells compared to other factors (Tables 11-13). Therefore, in order to help CAR T cells achieve therapeutic effects in hematoma in the treatment of solid tumors, IL-6 and IFNγ were first selected to be expressed or overexpressed in modified T cells for treating solid tumors.

TABLE 10

| | | CART Dosage | | |
|---|---|---|---|---|
| Patient ID | Tumor type | (×10E6/kg) | Response | CRS grade |
| JPDX | B-ALL | 4.8 | MRD | 3 |
| | | | (−) | |
| FPCY | B-ALL | 1.7 | MRD | 4 |
| | | | (−) | |
| SPJP | B-ALL | 2.8 | MRD | 3 |
| | | | (−) | |

TABLE 11

| JPDX Days | IL2 | IL4 | IL6 | IL10 | TNFa | IFNγ |
|---|---|---|---|---|---|---|
| after infusion | pg/mL | pg/mL | pg/mL | pg/mL | pg/mL | pg/mL |
| 1 | 13.56 | 1.11 | 18.62 | 6.58 | 0.96 | 36.55 |
| 2 | 3.44 | 1.53 | 30.56 | 8.28 | 1.4 | 103.06 |
| 3 | 7.89 | 1.11 | 624.56 | 14.2 | 1.76 | 135.28 |
| 4 | 1.3 | 1.13 | 280.87 | 18.28 | 1.97 | 65.3 |
| 5 | 7.43 | 3.35 | 211.72 | 30.69 | 3.86 | 66.9 |
| 6 | 2.64 | 1.5 | 105.56 | 10.78 | 0.75 | 16.97 |
| 7 | 0 | 0 | 57.22 | 8.25 | 0 | 7.27 |
| 9 | 6.79 | 1.5 | 263.59 | 12.6 | 1.37 | 38.78 |
| 14 | 5.12 | 1.5 | 566.55 | 9.13 | 0 | 28.31 |
| 21 | 0 | 1.86 | 35.15 | 5.02 | 0.95 | 0 |
| 33 | 6.24 | 2.96 | 12.91 | 10.38 | 1.11 | 1.84 |

TABLE 12

| FPCYDays | | | | | | | IL- | | | GM- |
|---|---|---|---|---|---|---|---|---|---|---|
| after | IL2 | IL4 | IL6 | IL10 | TNFa | IFNγ | 17A | IL-1a | IL-1β | CSF |
| infusion | pg/mL | pg/mL | pg/mL | pg/mL | pg/mL | pg/mL | pg/mL | pg/mL | pg/mL | pg/mL |
| 1 | 6.66 | 2.56 | 30.9 | 12.92 | 3.64 | 5.27 | 6.63 | 1.5 | 2.52 | 2.31 |
| 2 | 7.82 | 3.33 | 19 | 19.7 | 3.61 | 2.29 | 6.37 | 2.32 | 3.12 | 7.29 |
| 3 | 2.43 | 0.28 | 13.08 | 22.44 | 0.29 | 1.51 | 0.86 | 0.19 | 0.55 | 0.4 |
| 4 | 0 | 0 | 10.5 | 26.61 | 0 | 1.1 | 0 | 0 | 0 | 0 |
| 5 | 3.12 | 1.14 | 23.46 | 68.66 | 1.53 | 5.94 | 2.89 | 0.71 | 1.04 | 0.87 |
| 6 | 7.15 | 1.56 | 209.49 | 247.4 | 1.93 | 41.68 | 3.91 | 0.71 | 1.23 | 1.77 |
| 7 | 10.25 | 1.78 | 664.58 | 561.46 | 2.19 | 189.95 | 3.4 | 0.71 | 1.38 | 4.71 |
| 8 | 3.51 | 1.56 | 2820.04 | 212.49 | 2.03 | 37.74 | 2.89 | 0.61 | 2 | 1.29 |
| 9 | 0.8 | 0 | 132.57 | 7.48 | 0 | 1.1 | 0 | — | 0 | 0 |
| 10 | 0 | 0.24 | 130.16 | 5.07 | 0 | 2.13 | 0 | — | — | — |
| 12 | 4.45 | 0.35 | 74.25 | 5.13 | 0.23 | 10.72 | 0 | — | — | — |
| 13 | 0 | 0 | 49.18 | 5.86 | 0 | 2.75 | 0 | — | — | — |
| 14 | 0 | 0 | 37.61 | 6.7 | 0 | 0 | 0 | — | — | — |
| 16 | 0 | 0.29 | 63.5 | 33.9 | 0 | 2.65 | 0 | — | — | — |
| 18 | 3.51 | 0.25 | 725.22 | 266.9 | 0 | 12.24 | 0 | 0.93 | 1.53 | 0 |
| 21 | 3.57 | 0.25 | 424.71 | 76.26 | 0 | 3.15 | 0 | 0.93 | 0.64 | 0 |
| 30 | 4.33 | 1.7 | 49.76 | 4.86 | 1.76 | 4.28 | 4.25 | 0.59 | 1.37 | 1.05 |
| 62 | 4.87 | 1.7 | 11.21 | 4.86 | 1.76 | 3.34 | 3.7 | 0 | 1.16 | 0.87 |
| 90 | 3.23 | 1.2 | 8.7 | 3.83 | 0.1 | 1.88 | 2.59 | 0 | 0.29 | 0.87 |
| 120 | 0 | 0 | 6.84 | 7.46 | 0 | 0 | 0 | 0 | 0 | 0 |
| 128 | 4.34 | 0.39 | 18.42 | 7.99 | 0.7 | 1.54 | 1.28 | 0 | 0.47 | 0.15 |
| 154 | 11.11 | 2.57 | 29.99 | 11.62 | 6.55 | 2.89 | 5.04 | 0.82 | 24.83 | 1.52 |

TABLE 13

| SPJPDays | | | | | | | | | | | GM- |
|---|---|---|---|---|---|---|---|---|---|---|---|
| after | IL2 | IL4 | IL6 | IL10 | TNFa | IFNγ | IL1a | IL1β | IL15 | IL17A | CSF |
| infusion | pg/mL | pg/mL | pg/mL | pg/mL | pg/mL | pg/mL | pg/mL | pg/mL | pg/mL | pg/mL | pg/mL |
| 1 | 4.6 | 4.07 | 6.16 | 8.76 | 1.88 | 5.92 | | | | | |
| 2 | 2.21 | 2.23 | 7.59 | 7.04 | 0.7 | 2.7 | | | | | |
| 3 | 3.56 | 2.6 | 10.58 | 6.77 | 1.5 | 4.03 | | | | | |
| 4 | 4.04 | 3.7 | 12.91 | 7.04 | 0.91 | 4.01 | | | | | |
| 5 | 4.6 | 4.07 | 25.78 | 7.31 | 1.5 | 5.98 | | | | | |
| 6 | 1.54 | 1.7 | 36.8 | 6.83 | 2.5 | 13.1 | | | | | |
| 7 | 1.05 | 2.18 | 38.78 | 7.98 | 3.72 | 31.37 | 3.34 | 1.86 | 4.02 | 4.58 | 1.58 |
| 8 | 8.05 | 0.53 | 517.58 | 65.02 | 1.87 | 228.77 | 1.2 | 5.1 | 0.53 | 7.03 | 2.21 |
| 9 | 2.97 | 1.26 | 439.82 | 51.75 | 3.67 | 106.21 | 0.69 | 1.17 | 0.28 | 2.19 | 1.19 |
| 10 | 5.15 | 4.45 | 57.42 | 19.86 | 2.27 | 19.26 | — | — | — | — | — |
| 14 | 1.17 | 0.59 | 38.65 | 4.5 | 0.39 | 5.03 | — | — | — | 0 | — |
| 20 | 2.22 | 1.78 | 13.48 | 6.42 | 2.7 | 7.97 | — | — | — | 4.35 | — |
| 30 | 2.13 | 1.87 | 10.72 | 20.22 | 1.24 | 4.54 | — | — | — | 3.12 | — |
| 60 | 4.12 | 1.66 | 8.21 | 5.91 | 1.53 | 2.5 | 0.93 | 1.23 | — | 3.4 | 1.12 |
| 90 | 3.79 | 1.46 | 25.74 | 7.46 | 2.01 | 5.72 | 0.06 | 0.96 | — | 3.7 | 1.05 |
| 123 | 4.87 | 1.94 | 42.87 | 9.47 | 1.76 | 7.7 | 0 | 0.96 | — | 3.7 | 0.87 |

[0544] All publications, patents and patent applications cited in this specification are incorporated herein by reference in their entireties as if each individual publication, patent or patent application were specifically and individually indicated to be incorporated by reference. While the foregoing has been described in terms of various embodiments, the skilled artisan will appreciate that various modifications, substitutions, omissions, and changes may be made without departing from the spirit thereof.

1. A pharmaceutical composition, wherein the pharmaceutical composition comprises modified T cells comprising a first nucleic acid encoding a chimeric antigen receptor (CAR) and a second nucleic acid encoding one or more therapeutic agents comprising IL-6, IFN-γ, or a combination thereof.

2. The pharmaceutical composition of claim 1, wherein the modified T cells express and secrete the one or more therapeutic agents in response to activation of the modified T cells.

3. The pharmaceutical composition of claim 1, wherein the one or more therapeutic agents comprise IL-6 and IFN-γ.

4. The pharmaceutical composition of claim 3, wherein the modified T cells comprise nucleic acid sequences encoding SEQ ID NOS: 287 and 328.

5. The pharmaceutical composition of claim 1, wherein the CAR comprises an extracellular domain, a transmembrane domain, and an intracellular domain, the extracellular domain binding an antigen.

6. (canceled)

7. The pharmaceutical composition of claim 5, wherein the intracellular domain comprises a co-stimulatory domain that comprises an intracellular domain of a co-stimulatory molecule selected from the group consisting of CD27, CD28, 4-1BB, OX40, CD30, CD40, PD-1, ICOS, lymphocyte function-associated antigen-1 (LFA-1), CD2, CD7, LIGHT, NKG2C, B7-H3, and one combination thereof.

8. The pharmaceutical composition of claim 5, wherein the antigen is.

9. The pharmaceutical composition of claim 1, wherein the one or more therapeutic agents are present in the modified T cells in a recombinant DNA construct, in an mRNA, or in a viral vector.

10. The pharmaceutical composition of claim 1, wherein the modified T cells comprise a nucleic acid sequence comprising a promoter comprising a binding site for a transcription modulator that modulates the expression and/or secretion of the one or more therapeutic agents in the modified cell.

11. The pharmaceutical composition of claim 10, wherein the transcription modulator is or comprises Hif1a, NFAT, FOXP3, or NFkB.

12. The pharmaceutical composition of claim 10, wherein the promoter is responsive to the transcription modulator.

13. The pharmaceutical composition of claim 10, wherein the promoter is operably linked to the nucleic acid sequence encoding the one or more therapeutic agents, and wherein the promoter drives expression and/or secretion of the one or more therapeutic agents in the cell.

14. The pharmaceutical composition of claim 10, wherein the promoter comprises at least a sequence of SEQ ID NOS: 323, 324, or 325.

15. The pharmaceutical composition of claim 1, wherein the modified T cells comprise nucleic acid sequences encoding SEQ ID NOS: 286 and 469, and a nucleic acid sequence encoding SEQ ID NO: 328.

16. The pharmaceutical composition of claim 1, wherein the CAR and the one or more therapeutic agents are produced in the form of a polyprotein, which is cleaved to generate separate CAR and therapeutic agent molecules, and there is a cleavable moiety between the CAR and the one or more therapeutic agents, the cleavable moiety comprising a 2A peptide, and the 2A peptide comprising P2A or T2A.

17. The pharmaceutical composition of claim 1, wherein the modified T cells comprise an additional CAR, and the additional CAR binds a solid tumor antigen.

18. The pharmaceutical composition of claim 17, wherein the solid tumor antigen is.

19. The pharmaceutical composition of claim 17, wherein the modified T cells comprise a dominant negative PD-1.

20. A method of inducing T cell response in a subject in need thereof, the method comprising administering an effective amount of the pharmaceutical composition of claim 1 to the subject.

The application's sequence listing, which the Patent Office published only in electronic form, follows.

SEQUENCE LISTING (469 sequences)

SEQ ID NO: 1 - protein, 21 aa, Artificial Sequence
  Synthesized
MALPVTALLLPLALLLHAARP

SEQ ID NO: 2 - protein, 69 aa, Artificial Sequence
  Synthesized
AKPTTTPAPRPPTPAPTIASQPLSLRPEACRPAAGGAVHTRGLDFACDIYIWAPLAGTCGVLLLSLVIT

SEQ ID NO: 3 - protein, 42 aa, Artificial Sequence
  Synthesized
KRGRKKLLYIFKQPFMRPVQTTQEEDGCSCRFPEEEEGGCEL

SEQ ID NO: 4 - protein, 112 aa, Artificial Sequence
  Synthesized
RVKFSRSADAPAYKQGQNQLYNELNLGRREEYDVLDKRRGRDPEMGGKPRRKNPQEGLYNELQKDKMAEAYSEIGMKGERRRGKGHDGLYQGLSTATKDTYDALHMQALPPR

SEQ ID NO: 5 - protein, 242 aa, Artificial Sequence
  Synthesized
DIQMTQSPSSLSASVGDRVTITCRASQDISKYLNWYQQKPGKAPKLLIYHTSRLHSGVPSRFSGSGSGTDFTLTISSLQPEDFATYYCQQGNTLPYTFGQGTKVEIKGGGGSGGGGSGGGGSEVQLVESGGGLVQPGGSLRLSCAASGVSLPDYGVSWVRQAPGKGLEWVSVIWGSETTYYNSALKSRFTISRDNAKNSLYLQMNSLRAEDTAVYYCAKHYYYGGSYAMDYWGQGTLVTVSS

SEQ ID NO: 6 - protein, 242 aa, Artificial Sequence
  Synthesized
DIQMTQTTSSLSASLGDRVTISCRASQDISKYLNWYQQKPDGTVKLLIYHTSRLHSGVPSRFSGSGSGTDYSLTISNLEQEDIATYFCQQGNTLPYTFGGGTKLEITGGGGSGGGGSGGGGSEVKLQESGPGLVAPSQSLSVTCTVSGVSLPDYGVSWIRQPPRKGLEWLGVIWGSETTYYNSALKSRLTIIKDNSKSQVFLKMNSLQTDDTAIYYCAKHYYYGGSYAMDYWGQGTSVTVSS

SEQ ID NO: 7 - protein, 237 aa, Artificial Sequence
  Synthesized
DIQMTQSPASLSVSVGETVTITCRASENIYSNLAWYQQKQGKSPQLLVYVATNLADGVPSRFSGSGSGTQYSLKINSLQSEDFGSYYCQHFWGTPYTFGGGTKLGGGGSGGGGSGGGGSEVQLQQSGAELVKPGASVKLSCTASGFNINDTYMHWVKQRPEQGLEWIGRIDPANGNTKYDPKFQGKATITADTSSNTAYLQLSSLTSEDTAVYYCARGARGSRFAYWGQGTLVTVSA

SEQ ID NO: 8 - protein, 244 aa, Artificial Sequence
  Synthesized
QSVLTQPPSVSAAPGQKVTISCSGSSSDIGSNYVSWYQQFPGTAPKLLIYDNNKRPSAIPDRFSGSKSGTSATLGITGLQTGDEADYYCGTWDSRLGIAVFGGGTQLTVLGGGGSGGGGSGGGGSEVQLVQSGAEVKKPGQSLKISCKASGYSLTDNWIGWVRQKPGKGLEWMGIIYPGDSDTRYSPSFQGQVTISADKSINTAYLQWSSLKASDTAIYYCVGLDWNYNPLRYWGPGTLVTVSS

SEQ ID NO: 9 - protein, 252 aa, Artificial Sequence
  Synthesized
DIVLTQSPASLAVSLGQGATISCRASKSVSTSGYTYMHWYQQKPGQPPKLLIYLASNLESGVPARFSGSGSGTDFTLNIHPVEEEDAATYYCQHSGELPPSFGGGTKLEIKRAGGGGSGGGGSGGGGSEVQLVESGGDLVKPGGSLKLSCAVSGFTFSSYGMSWVRQTPDKRLEWVATVSSGGTYTYYPDSVKGRFTISRDNAKNTLYLQMSSLKSEDSAMYYCARHRGNYYATYYYAMDYWGQGTSVTVSS

SEQ ID NO: 10 - protein, 243 aa, Artificial Sequence
  Synthesized
DVQITQSPSYLAASPGETITINCRASKSISKYLAWYQEKPGKTNKLLIYSGSTLQSGIPSRFSGSGSGTDFTLTISSLEPEDFAMYYCQQHHEYPYTFGGGTKLEIKGGGGSGGGGSGGGGSQVQLQQPGAELVRPGASVKLSCKASGYTFTTYWMNWVKQRPEQGLEWIGRIDPYDSETHYNQKFKDKAILTVDKSSSTAYMQLSSLTSEDSAVYYCARGPYYGTNPWFPYWGQGTLVTVSS

SEQ ID NO: 11 - protein, 241 aa, Artificial Sequence
  Synthesized
EIVMTQSPATLSVSPGERATLSCRASQSVSRNLAWYQQKPGQAPRLLIYGASTRATGIPARFSGSGSGTEFTLTIGSLQSEDFAVYYCQQYKTWPRTFGQGTNVEIKGGGGSGGGGSGGGGSQVQLQQWGAGLLKPSETLSLTCAVFGGSFSGYYWSWIRQPPGKGLEWIGEINHRGNTNDNPSLKSRVTISVDTSKNQFALKLSSVTAADTAVYYCARERGYTYGNFDHWGQGTLVTVSS

SEQ ID NO: 12 - protein, 246 aa, Artificial Sequence
  Synthesized
DVVMTQTPLSLPVRLGDQASISCRSSQSLVHSNGNTYLHWYLQKPGQSPKLLIYKVSNRFSGVPDRFSGSGSGTNFTLKISRVEAEDLGLYFCSQSTHVPYTFGGGTKLEIKRAGGGGSGGGGSGGGGSQVQLRQSGPELVKPGASVKMSCKASGYTFTDYVISWVKQRTGQGLEWIGDIYPGSGYSFYNENFKGKATLTADKSSTTAYMQLSSLTSEDSAVYFCATYYNYPFAYWGQGTLVTVSA

SEQ ID NO: 13 - protein, 199 aa, Artificial Sequence
  Synthesized
LPICPGGAARCQVTLRDLFDRAVVLSHYIHNLSSEMFSEFDKRYTHGRGFITKAINSCHTSSLATPEDKEQAQQMNQKDFLSLIVSILRSWNEPLYHLVTEVRGMQEAPEAILSKAVEIEEQTKRLLEGMELIVSQVHPETKENEIYPVWSGLPSLQMADEESRLSAYYNLLHCLRRDSHKIDNYLKLLKCRIIHNNNC

SEQ ID NO: 14 - protein, 240 aa, Artificial Sequence
  Synthesized
DIVMTQSPDSLAVSLGERATINCKSSQSLLNSRTRKNYLAWYQQKPGQPPKLLIYWASTRESGVPDRFSGSGSGTDFTLTISSLQAEDVAVYYCTQSFILRTFGQGTKVEIKGGGGGSGGGGSGGGGSDIVMTQSPDSLAVSLGERATINCKSSQSLLNSRTRKNYLAWYQQKPGQPPKLLIYWASTRESGVPDRFSGSGSGTDFTLTISSLQAEDVAVYYCTQSFILRTFGQGTKVEIK

SEQ ID NO: 15 - protein, 281 aa, Artificial Sequence
  Synthesized
MNVPTQLLGLLLLWLTGGKCDIQMTQSPASLSASLEEIVTITCKASQAIDAYLSWYQQKPGKSPQLLIYDATSLADGVPSRFSGSRSGTQYSLKISRPQVDDSGIYYCLQSYSTPFTFGSGTKLEIKGGGGGSGGGGSGGGGSMAVLVLLLCLLIFPSCVLSQVQLKESGPGLVQPSQTLSLTCTVSGSSLTSNSVSWIRQPPGKGLEWMGVIWSNGDADYNSAIKSRLSISRDTSKSQVFLKMNSLQTEDTAMYFCASPYYGYYFPFDYWGQGVMVTVSS

SEQ ID NO: 16 - protein, 285 aa, Artificial Sequence
  Synthesized
METDTLLLWVLLLWVPGSTGDIVLTQSPALAVSLGQRATISCRASQSVSISSHDLMQWYQQKPGQQPKLLIYDAFNLASGIPVRFSGSGSGTDFTLTIDPVQADDIATYYCQQSKDDPYTFGAGTKLELKGGGGGSGGGGSGGGGSMDIRLSLAFLVLFIKGVQCEVQLVESGGGLVQPGRSMKLSCAASGFTFSNYGMAWVRQAPTKGLEWVATISYDGSITYYRDSVKGRFTISRDHAKSTLYLQMNSLRSEDTATYYCTREEQYSSWYFDFWGPGIMVTVSS

SEQ ID NO: 17 - protein, 242 aa, Artificial Sequence
  Synthesized
NIVMTQSPSSLSASVGDRVTITCQASQDVGTAVAWYQQKPDQSPKLLIYWTSTRHTGVPDRFTGSGSGTDFTLTISSLQPEDIATYFCHQYNSYNTFGSGTKLEIKGGGGGSGGGGSGGGGSQVTLKESGPVLVKPTETLTLTCTFSGFSLSTSGMGVGWIRQAPGKGLEWVAHIWWDDDVYYNPSLKSRLTITKDASKDQVSLKLSSVTAADTAVYYCVRRRATGTGFDYWGQGTLVTVSS

SEQ ID NO: 18 - protein, 272 aa, Homo sapiens
PEEPLVVKVEEGDNAVLQCLKGTSDGPTQQLTWSRESPLKPFLKLSLGLPGLGIHMRPLAIWLFIFNVSQQMGGFYLCQPGPPSEKAWQPGWTVNVEGSGELFRWNVSDLGGLGCGLKNRSSEGPSSPSGKLMSPKLYVWAKDRPEIWEGEPPCLPPRDSLNQSLSQDLTMAPGSTLWLSCGVPPDSVSRGPLSWTHVHPKGPKSLLSLELKDDRPARDMWVMETGLLLPRATAQDAGKYYCHRGNLTMSFHLEITARPVLWHWLLRTGGWK

SEQ ID NO: 19 - protein, 205 aa, Homo sapiens
ISSMDMERPGDGKCQPIEIPMCKDIGYNMTRMPNLMGHENQREAAIQLHEFAPLVEYGCHGHLRFFLCSLYAPMCTEQVSTPIPACRVMCEQARLKCSPIMEQFNFKWPDSLDCRKLPNKNDPNYLCMEAPNNGSDEPTRGSGLFPPLFRPQRPHSAQEHPLKDGGPGRGGCDNPGKFHHVEKSASCAPLCTPGVDVYWSREDKR

SEQ ID NO: 20 - protein, 393 aa, Homo sapiens
GMGCSSPPCECHQEEDFRVTCKDIQRIPSLPPSTQTLKLIETHLRTIPSHAFSNLPNISRIYVSIDVTLQQLESHSFYNLSKVTHIEIRNTRNLTYIDPDALKELPLLKFLGIFNTGLKMFPDLTKVYSTDIFFILEITDNPYMTSIPVNAFQGLCNETLTLKLYNNGFTSVQGYAFNGTKLDAVYLNKNKYLTVIDKDAFGGVYSGPSLLDVSQTSVTALPSKGLEHLKELIARNTWTLKKLPLSLSFLHLTRADLSYPSHCCAFKNQKKIRGILESLMCNESSMQSLRQRKSVNALNSPLHQEYEENLGDSIVGYKEKSKFQDTHNNAHYYVFFEEQEDEIIGFGQELKNPQEETLQAFDSHYDYTICGDSEDMVCTPKSDEFNPCEDIMG

SEQ ID NO: 21 - protein, 210 aa, Homo sapiens
QLPPGKPEIFKCRSPNKETFTCWWRPGTDGGLPTNYSLTYHREGETLMHECPDYITGGPNSCHFGKQYTSMWRTYIMMVNATNQMGSSFSDELYVDVTYIVQPDPPLELAVEVKQPEDRKPYLWIKWSPPTLIDLKTGWFTLLYEIRLKPEKAAEWEIHFAGQQTEFKILSLHPGQKYLVQVRCKPDHGYWSAWSPATFIQIPSDFTMND

SEQ ID NO: 22 - protein, 4368 aa, Homo sapiens
EQDLSVNRAVWDGGGCISQGDVLNRQCQQLSQHVRTGSAANTATGTTSTNVVEPRMYLSCSTNPEMTSIESSVTSDTPGVSSTRMTPTESRTTSESTSDSTTLFPSSTEDTSSPTTPEGTDVPMSTPSEESISSTMAFVSTAPLPSFEAYTSLTYKVDMSTPLTTSTQASSSPTTPESTTIPKSTNSEGSTPLTSMPASTMKVASSEAITLLTTPVEISTPVTISAQASSSPTTAEGPSLSNSAPSGGSTPLTRMPLSVMLVVSSEASTLSTTPAATNIPVITSTEASSSPTTAEGTSIPTSTYTEGSTPLTSTPASTMPVATSEMSTLSITPVDTSTLVTTSTEPSSLPTTAEATSMLTSTLSEGSTPLTNMPVSTILVASSEASTTSTIPVDSKTFVTTASEASSSPTTAEDTSIATSTPSEGSTPLTSMPVSTTPVASSEASNLSTTPVDSKTQVTTSTEASSSPPTAEVNSMPTSTPSEGSTPLTSMSVSTMPVASSEASTLSTTPVDTSTPVTTSSEASSSSTTPEGTSIPTSTPSEGSTPLTNMPVSTRLVVSSEASTTSTTPADSNTFVTTSSEASSSSTTAEGTSMPTSTYSERGTTITSMSVSTTLVASSEASTLSTTPVDSNTPVTTSTEATSSSTTAEGTSMPTSTYTEGSTPLTSMPVNTTLVASSEASTLSTTPVDTSTPVTTSTEASSSPTTADGASMPTSTPSEGSTPLTSMPVSKTLLTSSEASTLSTTPLDTSTHITTSTEASCSPTTTEGTSMPISTPSEGSPLLTSIPVSITPVTSPEASTLSTTPVDSNSPVTTSTEVSSSPTPAEGTSMPTSTYSEGRTPLTSMPVSTTLVATSAISTLSTTPVDTSTPVTNSTEARSSPTTSEGTSMPTSTPGEGSTPLTSMPDSTTPVVSSEARTLSATPVDTSTPVTTSTEATSSPTTAEGTSIPTSTPSEGTTPLTSTPVSHTLVANSEASTLSTTPVDSNTPLTTSTEASSPPPTAEGTSMPTSTPSEGSTPLTRMPVSTTMVASSETSTLSTTPADTSTPVTTYSQASSSSTTADGTSMPTSTYSEGSTPLTSVPVSTRLVVSSEASTLSTTPVDTSIPVTTSTEASSSPTTAEGTSIPTSPPSEGTTPLASMPVSTTLVVSSEANTLSTTPVDSKTQVATSTEASSPPPTAEVTSMPTSTPGERSTPLTSMPVRHTPVASSEASTLSTSPVDTSTPVTTSAETSSSPTTAEGTSLPTSTTSEGSTLLTSIPVSTTLVTSPEASTLLTTPVDTKGPVVTSNEVSSSPTPAEGTSMPTSTYSEGRTPLTSIPVNTTLVASSAISILSTTPVDNSTPVTTSTEACSSPTTSEGTSMPNSNPSEGTTPLTSIPVSTTPVVSSEASTLSATPVDTSTPGTTSAEATSSPTTAEGISIPTSTPSEGKTPLKSIPVSNTPVANSEASTLSTTPVDSNSPVVTSTAVSSSPTPAEGTSIAISTPSEGSTALTSIPVSTTTVASSEINSLSTTPAVTSTPVTTYSQASSSPTTADGTSMQTSTYSEGSTPLTSLPVSTMLVVSSEANTLSTTPIDSKTQVTASTEASSSTTAEGSSMTISTPSEGSPLLTSIPVSTTPVASPEASTLSTTPVDSNSPVITSTEVSSSPTPAEGTSMPTSTYTEGRTPLTSITVRTTPVASSAISTLSTTPVDNSTPVTTSTEARSSPTTSEGTSMPNSTPSEGTTPLTSIPVSTTPVLSSEASTLSATPIDTSTPVTTSTEATSSPTTAEGTSIPTSTLSEGMTPLTSTPVSHTLVANSEASTLSTTPVDSNSPVVTSTAVSSSPTPAEGTSIATSTPSEGSTALTSIPVSTTTVASSETNTLSTTPAVTSTPVTTYAQVSSSPTTADGSSMPTSTPREGRPPLTSIPVSTTTVASSEINTLSTTLADTRTPVTTYSQASSSPTTADGTSMPTPAYSEGSTPLTSMPLSTTLVVSSEASTLSTTPVDTSTPATTSTEGSSSPTTAGGTSIQTSTPSERTTPLAGMPVSTTLVVSSEGNTLSTTPVDSKTQVTNSTEASSSATAEGSSMTISAPSEGSPLLTSIPLSTTPVASPEASTLSTTPVDSNSPVITSTEVSSSPIPTEGTSMQTSTYSDRRTPLTSMPVSTTVVASSAISTLSTTPVDTSTPVTNSTEARSSPTTSEGTSMPTSTPSEGSTPFTSMPVSTMPVVTSEASTLSATPVDTSTPVTTSTEATSSPTTAEGTSIPTSTLSEGTTPLTSIPVSHTLVANSEVSTLSTTPVDSNTPFTTSTEASSPPPTAEGTSMPTSTSSEGNTPLTRMPVSTTMVASFETSTLSTTPADTSTPVTTYSQAGSSPTTADDTSMPTSTYSEGSTPLTSVPVSTMPVVSSEASTHSTTPVDTSTPVTTSTEASSSPTTAEGTSIPTSPPSEGTTPLASMPVSTTPVVSSEAGTLSTTPVDTSTPMTTSTEASSSPTTAEDIVVPISTASEGSTLLTSIPVSTTPVASPEASTLSTTPVDSNSPVVTSTEISSSATSAEGTSMPTSTYSEGSTPLRSMPVSTKPLASSEASTLSTTPVDTSIPVTTSTETSSSPTTAKDTSMPISTPSEVSTSLTSILVSTMPVASSEASTLSTTPVDTRTLVTTSTGTSSSPTTAEGSSMPTSTPGERSTPLTNILVSTTLLANSEASTLSTTPVDTSTPVTTSAEASSSPTTAEGTSMRISTPSDGSTPLTSILVSTLPVASSEASTVSTTAVDTSIPVTTSTEASSSPTTAEVTSMPTSTPSETSTPLTSMPVNHTPVASSEAGTLSTTPVDTSTPVTTSTKASSSPTTAEGIVVPISTASEGSTLLTSIPVSTTPVASSEASTLSTTPVDTSIPVTTSTEGSSSPTTAEGTSMPISTPSEVSTPLTSILVSTVPVAGSEASTLSTTPVDTRTPVTTSAEASSSPTTAEGTSMPISTPGERRTPLTSMSVSTMPVASSEASTLSRTPADTSTPVTTSTEASSSPTTAEGTGIPISTPSEGSTPLTSIPVSTTPVAIPEASTLSTTPVDSNSPVVTSTEVSSSPTPAEGTSMPISTYSEGSTPLTGVPVSTTPVTSSAISTLSTTPVDTSTPVTTSTEAHSSPTTSEGTSMPTSTPSEGSTPLTYMPVSTMLVVSSEDSTLSATPVDTSTPVTTSTEATSSTTAEGTSIPTSTPSEGMTPLTSVPVSNTPVASSEASILSTTPVDSNTPLTTSTEASSSPPTAEGTSMPTSTPSEGSTPLTSMPVSTTTVASSETSTLSTTPADTSTPVTTYSQASSSPPIADGTSMPTSTYSEGSTPLTNMSFSTTPVVSSEASTLSTTPVDTSTPVTTSTEASLSPTTAEGTSIPTSSPSEGTTPLASMPVSTTPVVSSEVNTLSTTPVDSNTLVTTSTEASSSPTIAEGTSLPTSTTSEGSTPLSIMPLSTTPVASSEASTLSTTPVDTSTPVTTSSPTNSSPTTAEVTSMPTSTAGEGSTPLTNMPVSTTPVASSEASTLSTTPVDSNTFVTSSSQASSSPATLQVTTMRMSTPSEGSSSLTTMLLSSTYVTSSEASTPSTPSVDRSTPVTTSTQSNSTPTPPEVITLPMSTPSEVSTPLTIMPVSTTSVTISEAGTASTLPVDTSTPVITSTQVSSSPVTPEGTTMPIWTPSEGSTPLTTMPVSTTRVTSSEGSTLSTPSVVTSTPVTTSTEAISSSATLDSTTMSVSMPMEISTLGTTILVSTTPVTRFPESSTPSIPSVYTSMSMTTASEGSSSPTTLEGTTTMPMSTTSERSTLLTTVLISPISVMSPSEASTLSTPPGDTSTPLLTSTKAGSFSIPAEVTTIRISITSERSTPLTTLLVSTTLPTSFPGASIASTPPLDTSTTFTPSTDTASTPTIPVATTISVSVITEGSTPGTTIFIPSTPVTSSTADVFPATTGAVSTPVITSTELNTPSTSSSSTTTSFSTTKEFTTPAMTTAAPLTYVTMSTAPSTPRTTSRGCTTSASTLSATSTPHTSTSVTTRPVTPSSESSRPSTITSHTIPPTFPPAHSSTPPTTSASSTTVNPEAVTTMTTRTKPSTRTTSFPTVTTTAVPTNTTIKSNPTSTPTVPRTTTCFGDGCQNTASRCKNGGTWDGLKCQCPNLYYGELCEEVVSSIDIGPPETISAQMELTVTVTSVKFTEELKNHSSQEFQEFKQTFTEQMNIVYSGIPEYVGVNITKLRLGSVVVEHDVLLRTKYTPEYKTVLDNATEVVKEKITKVTTQQIMINDICSDMMCFNTTGTQVQNITVTQYDPEEDCRKMAKEYGDYFVVEYRDQKPYCISPCEPGFSVSKNCNLGKCQMSLSGPQCLCVTTETHWYSGETCNQGTQKSLVYG

SEQ ID NO: 23 - protein, 407 aa, Homo sapiens
SQVSQNCHNGSYEISVLMMGNSAFAEPLKNLEDAVNEGLEIVRGRLQNAGLNVTVNATFMYSDGLIHNSGDCRSSTCEGLDLLRKISNAQRMGCVLIGPSCTYSTFQMYLDTELSYPMISAGSFGLSCDYKETLTRLMSPARKLMYFLVNFWKTNDLPFKTYSWSTSYVYKNGTETEDCFWYLNALEASVSYFSHELGFKVVLRQDKEFQDILMDHNRKSNVIIMCGGPEFLYKLKGDRAVAEDIVIILVDLFNDQYFEDNVTAPDYMKNVLVLTLSPGNSLLNSSFSRNLSPTKRDFALAYLNGILLFGHMLKIFLENGENITTPKFAHAFRNLTFEGYDGPVTLDDWGDVDSTMVLLYTSVDTKKYKVLLTYDTHVNKTYPVDMSPTFTWKNSKLPNDITGRGPQ

SEQ ID NO: 24 - protein, 264 aa, Homo sapiens
PRFMGTISDVKTNVQLLKGRVDNISTLDSEIKKNSDGMEAAGVQIQMVNESLGYVRSQFLKLKTSVEKANAQIQILTRSWEEVSTLNAQIPELKSDLEKASALNTKIRALQGSLENMSKLLKRQNDILQVVSQGWKYFKGNFYYFSLIPKTWYSAEQFCVSRNSHLTSVTSESEQEFLYKTAGGLIYWIGLTKAGMEGDWSWVDDTPFNKVQSVRFWIPGEPNNAGNNEHCGNIKAPSLQAWNDAPCDKTFLFICKRPYVPSEP

SEQ ID NO: 25 - protein, 100 aa, Homo sapiens
DGNEEMGGITQTPYKVSISGTTVILTCPQYPGSEILWQHNDKNIGGDEDDKNIGSDEDHLSLKEFSELEQSGYYVCYPRGSKPEDANFYLYLRARVCENC

SEQ ID NO: 26 - protein, 371 aa, Homo sapiens
KKVVLGKKGDTVELTCTASQKKSIQFHWKNSNQIKILGNQGSFLTKGPSKLNDRADSRRSLWDQGNFPLIIKNLKIEDSDTYICEVEDQKEEVQLLVFGLTANSDTHLLQGQSLTLTLESPPGSSPSVQCRSPRGKNIQGGKTLSVSQLELQDSGTWTCTVLQNQKKVEFKIDIVVLAFQKASSIVYKKEGEQVEFSFPLAFTVEKLTGSGELWWQAERASSSKSWITFDLKNKEVSVKRVTQDPKLQMGKKLPLHLTLPQALPQYAGSGNLTLALEAKTGKLHQEVNLVVMRATQLQKNLTCEVWGPTSPKLMLSLKLENKEAKVSKREKAVWVLNPEAGMWQCLLSDSGQVLLESNIKVLPTWSTPVQP

SEQ ID NO: 27 - protein, 348 aa, Homo sapiens
RLSWYDPDFQARLTRSNSKCQGQLEVYLKDGWHMVCSQSWGRSSKQWEDPSQASKVCQRLNCGVPLSLGPFLVTYTPQSSIICYGQLGSFSNCSHSRNDMCHSLGLTCLEPQKTTPPTTRPPPTTTPEPTAPPRLQLVAQSGGQHCAGVVEFYSGSLGGTISYEAQDKTQDLENFLCNNLQCGSFLKHLPETEAGRAQDPGEPREHQPLPIQWKIQNSSCTSLEHCFRKIKPQKSGRVLALLCSGFQPKVQSRLVGGSSICEGTVEVRQGAQWAALCDSSSARSSLRWEEVCREQQCGSVNSYRVLDAGDPTSRGLFCPHQKLSQCHELWERNSYCKKVFVTCQDPNP

SEQ ID NO: 28 - DNA, 7902 bp, Artificial Sequence
  Synthesized
gtcgacactagtaatcaacctctggattacaaaatttgtgaaagattgactggtattcttaactatgttgctccttttacgctatgtggatacgctgctttaatgcctttgtatcatgctattgcttcccgtatggctttcattttctcctccttgtataaatcctggttgctgtctctttatgaggagttgtggcccgttgtcaggcaacgtggcgtggtgtgcactgtgtttgctgacgcaacccccactggttggggcattgccaccacctgtcagctcctttccgggactttcgctttccccctccctattgccacggcggaactcatcgccgcctgccttgcccgctgctggacaggggctcggctgttgggcactgacaattccgtggtgttgtcggggaagctgacgtcctttccatggctgctcgcctgtgttgccacctggattctgcgcgggacgtccttctgctacgtcccttcggccctcaatccagcggaccttccttcccgcggcctgctgccggctctgcggcctcttccgcgtcttcgccttcgccctcagacgagtcggatctccctttgggccgcctccccgcctgccgcggaattcgagctcggtacctttaagaccaatgacttacaaggcagctgtagatcttagccactttttaaaagaaaaggggggactggaagggctaattcactcccaacgaagacaagatctgctttttgcttgtactgagtctctctggttagaccagatctgagcctgggagctctctggctaactagggaacccactgcttaagcctcaataaagcttgccttgagtgcttcaagtagtgtgtgcccgtctgttgtgtgactctggtaactagagatccctcagacccttttagtcagtgtggaaaatctctagcagtagtagttcatgtcatcttattattcagtatttataacttgcaaagaaatgaatatcagagagtgagaggaacttgtttattgcagcttataatggttacaaataaagcaatagcatcacaaatttcacaaataaagcatttttttcactgcattctagttgtggtttgtccaaactcatcaatgtatcttatcatgtctggctctagctatcccgcccctaactccgcccatcccgcccctaactccgcccagttccgcccattctccgccccatggctgactaattttttttatttatgcagaggccgaggccgcctcggcctctgagctattccagaagtagtgaggaggcttttttggaggcctagggacgtacccaattcgccctatagtgagtcgtattacgcgcgctcactggccgtcgttttacaacgtcgtgactgggaaaaccctggcgttacccaacttaatcgccttgcagcacatccccctttcgccagctggcgtaatagcgaagaggcccgcaccgatcgcccttcccaacagttgcgcagcctgaatggcgaatgggacgcgccctgtagcggcgcattaagcgcggcgggtgtggtggttacgcgcagcgtgaccgctacacttgccagcgccctagcgcccgctcctttcgctttcttcccttcctttctcgccacgttcgccggctttccccgtcaagctctaaatcgggggctccctttagggttccgatttagtgctttacggcacctcgaccccaaaaaacttgattagggtgatggttcacgtagtgggccatcgccctgatagacggtttttcgccctttgacgttggagtccacgttctttaatagtggactcttgttccaaactggaacaacactcaaccctatctcggtctattcttttgatttataagggattttgccgatttcggcctattggttaaaaaatgagctgatttaacaaaaatttaacgcgaattttaacaaaatattaacgcttacaatttaggtggcacttttcggggaaatgtgcgcggaacccctatttgtttatttttctaaatacattcaaatatgtatccgctcatgagacaataaccctgataaatgcttcaataatattgaaaaaggaagagtatgagtattcaacatttccgtgtcgcccttattcccttttttgcggcattttgccttcctgtttttgctcacccagaaacgctggtgaaagtaaaagatgctgaagatcagttgggtgcacgagtgggttacatcgaactggatctcaacagcggtaagatccttgagagttttcgccccgaagaacgttttccaatgatgagcacttttaaagttctgctatgtggcgcggtattatcccgtattgacgccgggcaagagcaactcggtcgccgcatacactattctcagaatgacttggttgagtactcaccagtcacagaaaagcatcttacggatggcatgacagtaagagaattatgcagtgctgccataaccatgagtgataacactgcggccaacttacttctgacaacgatcggaggaccgaaggagctaaccgcttttttgcacaacatgggggatcatgtaactcgccttgatcgttgggaaccggagctgaatgaagccataccaaacgacgagcgtgacaccacgatgcctgtagcaatggcaacaacgttgcgcaaactattaactggcgaactacttactctagcttcccggcaacaattaatagactggatggaggcggataaagttgcaggaccacttctgcgctcggcccttccggctggctggtttattgctgataaatctggagccggtgagcgtggctctcgcggtatcattgcagcactggggccagatggtaagccctcccgtatcgtagttatctacacgacggggagtcaggcaactatggatgaacgaaatagacagatcgctgagataggtgcctcactgattaagcattggtaactgtcagaccaagtttactcatatatactttagattgatttaaaacttcatttttaatttaaaaggatctaggtgaagatcctttttgataatctcatgaccaaaatcccttaacgtgagttttcgttccactgagcgtcagaccccgtagaaaagatcaaaggatcttcttgagatcctttttttctgcgcgtaatctgctgcttgcaaacaaaaaaaccaccgctaccagcggtggtttgtttgccggatcaagagctaccaactctttttccgaaggtaactggcttcagcagagcgcagataccaaatactgttcttctagtgtagccgtagttaggccaccacttcaagaactctgtagcaccgcctacatacctcgctctgctaatcctgttaccagtggctgctgccagtggcgataagtcgtgtcttaccgggttggactcaagacgatagttaccggataaggcgcagcggtcgggctgaacggggggttcgtgcacacagcccagcttggagcgaacgacctacaccgaactgagatacctacagcgtgagctatgagaaagcgccacgcttcccgaagggagaaaggcggacaggtatccggtaagcggcagggtcggaacaggagagcgcacgagggagcttccagggggaaacgcctggtatctttatagtcctgtcgggtttcgccacctctgacttgagcgtcgatttttgtgatgctcgtcaggggggcggagcctatggaaaaacgccagcaacgcggcctttttacggttcctggccttttgctggccttttgctcacatgttctttcctgcgttatcccctgattctgtggataaccgtattaccgcctttgagtgagctgataccgctcgccgcagccgaacgaccgagcgcagcgagtcagtgagcgaggaagcggaagagcgcccaatacgcaaaccgcctctccccgcgcgttggccgattcattaatgcagctggcacgacaggtttcccgactggaaagcgggcagtgagcgcaacgcaattaatgtgagttagctcactcattaggcaccccaggctttacactttatgcttccggctcgtatgttgtgtggaattgtgagcggataacaatttcacacaggaaacagctatgaccatgattacgccaagcgcgcaattaaccctcactaaagggaacaaaagctggagctgcaagcttaatgtagtcttatgcaatactcttgtagtcttgcaacatggtaacgatgagttagcaacatgccttacaaggagagaaaaagcaccgtgcatgccgattggtggaagtaaggtggtacgatcgtgccttattaggaaggcaacagacgggtctgacatggattggacgaaccactgaattgccgcattgcagagatattgtatttaagtgcctagctcgatacataaacggctctctctggttagaccagatctgagcctgggagctctctggctaactagggaacccactgcttaagcctcaataaagcttgccttgagtgcttcaagtagtgtgtgcccgtctgttgtgtgactctggtaactagagatccctcagacccttttagtcagtgtggaaaatctctagcagtggcgcccgaacagggacttgaaagcgaaagggaaaccagaggagctctctcgacgcaggactcggcttgctgaagcgcgcacggcaagaggcgaggggcggcgactggtgagtacgccaaaaattttgactagcggaggctagaaggagagagatgggtgcgagagcgtcagtattaagcgggggagaattagatcgcgatgggaaaaaattcggttaaggccagggggaaagaaaaaatataaattaaaacatatagtatgggcaagcagggagctagaacgattcgcagttaatcctggcctgttagaaacatcagaaggctgtagacaaatactgggacagctacaaccatcccttcagacaggatcagaagaacttagatcattatataatacagtagcaaccctctattgtgtgcatcaaaggatagagataaaagacaccaaggaagctttagacaagatagaggaagagcaaaacaaaagtaagaccaccgcacagcaagcggccgctgatcttcagacctggaggaggagatatgagggacaattggagaagtgaattatataaatataaagtagtaaaaattgaaccattaggagtagcacccaccaaggcaaagagaagagtggtgcagagagaaaaaagagcagtgggaataggagctttgttccttgggttcttgggagcagcaggaagcactatgggcgcagcgtcaatgacgctgacggtacaggccagacaattattgtctggtatagtgcagcagcagaacaatttgctgagggctattgaggcgcaacagcatctgttgcaactcacagtctggggcatcaagcagctccaggcaagaatcctggctgtggaaagatacctaaaggatcaacagctcctggggatttggggttgctctggaaaactcatttgcaccactgctgtgccttggaatgctagttggagtaataaatctctggaacagatttggaatcacacgacctggatggagtgggacagagaaattaacaattacacaagcttaatacactccttaattgaagaatcgcaaaaccagcaagaaaagaatgaacaagaattattggaattagataaatgggcaagtttgtggaattggtttaacataacaaattggctgtggtatataaaattattcataatgatagtaggaggcttggtaggtttaagaatagtttttgctgtactttctatagtgaatagagttaggcagggatattcaccattatcgtttcagacccacctcccaaccccgaggggacccgacaggcccgaaggaatagaagaagaaggtggagagagagacagagacagatccattcgattagtgaacggatctcgacggtatcgatcacgagactagcctcgacacaaatggcagtattcatccacaattttaaaagaaaaggggggattggggggtacagtgcaggggaaagaatagtagacataatagcaacagacatacaaactaaagaattacaaaaacaaattacaaaaattcaaaattttcgggtttattacagggacagcagaaatccactttggctcgagaagcttgatatcggctccggtgcccgtcagtgggcagagcgcacatcgcccacagtccccgagaagttggggggaggggtcggcaattgaaccggtgcctagagaaggtggcgcggggtaaactgggaaagtgatgtcgtgtactggctccgcctttttcccgagggtgggggagaaccgtatataagtgcagtagtcgccgtgaacgttctttttcgcaacgggtttgccgccagaacacaggatccgccaccatggccttaccagtgaccgccttgctcctgccgctggccttgctgctccacgccgccaggccggatatccagatgacccagagcccgagcagcctgagcgcgagcgtgggtgatcgcgtgaccattacctgcagggcaagtcaggacattagtaaatatttaaattggtatcagcagaaaccgggtaaagcgccgaaactgttaatttatcatacatcaagattacactcaggcgtgccgtcgcgttttagcggctcgggttcgggcaccgattttaccctgaccatctcgagcttgcagccggaggacttcgccacctactattgccaacagggtaatacgcttccgtacacgttcggtcagggcaccaaagtggagatcaaaggtggcggtggctcgggcggtggtgggtcgggtggcggcggatctgaggtgcagctggtggagtctgggggaggcttggtacagcctggggggtccctgagactctcctgtgcagcctctggagtgtccctgcctgattatggcgtgtcctgggtccgccaggctccagggaaggggctggagtgggtttcagtgatctggggcagcgagacaacctactacaacagcgccctgaagtcccgattcaccatctccagagacaatgccaagaactcactgtatctgcaaatgaacagcctgagagccgaggacacggctgtgtattactgtgcgaagcactactactacggcggcagctacgctatggactactggggccaaggaaccctggtcaccgtgtcctcaaccacgacgccagcgccgcgaccaccaacaccggcgcccaccatcgcgtcgcagcccctgtccctgcgcccagaggcgtgccggccagcggcggggggcgcagtgcacacgagggggctggacttcgcctgtgatatctacatctgggcgcccttggccgggacttgtggggtccttctcctgtcactggttatcaccctttactgcaaacggggcagaaagaaactcctgtatatattcaaacaaccatttatgagaccagtacaaactactcaagaggaagatggctgtagctgccgatttccagaagaagaagaaggaggatgtgaactgagagtgaagttcagcaggagcgcagacgcccccgcgtacaagcagggccagaaccagctctataacgagctcaatctaggacgaagagaggagtacgatgttttggacaagaggcgtggccgggaccctgagatggggggaaagccgagaaggaagaaccctcaggaaggcctgtacaatgaactgcagaaagataagatggcggaggcctacagtgagattgggatgaaaggcgagcgccggaggggcaaggggcacgatggcctttaccagggtctcagtacagccaccaaggacacctacgacgcccttcacatgcaggccctgccccctcgctaatctagaggcgcgcc

SEQ ID NO: 29 - protein, 66 aa, Artificial Sequence
  Synthesized
TTTPAPRPPTPAPTIASQPLSLRPEACRPAAGGAVHTRGLDFACDIYIWAPLAGTCGVLLLSLVIT

SEQ ID NO: 30 - protein, 69 aa, Artificial Sequence
  Synthesized
TTTPAPRPPTPAPTIASQPLSLRPEACRPAAGGAVHTRGLDFACDIYIWAPLAGTCGVLLLSLVITLYC

SEQ ID NO: 31 - protein, 72 aa, Artificial Sequence
  Synthesized
AKPTTTPAPRPPTPAPTIASQPLSLRPEACRPAAGGAVHTRGLDFACDIYIWAPLAGTCGVLLLSLVITLYC

SEQ ID NO: 32 - protein, 69 aa, Artificial Sequence; identical to SEQ ID NO: 2
  Synthesized

SEQ ID NO: 33 - protein, 50 aa, Artificial Sequence
  Synthesized
AKPTTTPAPRPPTPAPTIASQPLSLRPEACRPAAGGAVHTRGLDFACDIY

SEQ ID NO: 34 - protein, 50 aa, Artificial Sequence; identical to SEQ ID NO: 33
  Synthesized

SEQ ID NO: 35 - protein, 47 aa, Artificial Sequence
  Synthesized
TTTPAPRPPTPAPTIASQPLSLRPEACRPAAGGAVHTRGLDFACDIY

SEQ ID NO: 36 - protein, 47 aa, Artificial Sequence; identical to SEQ ID NO: 35
  Synthesized

SEQ ID NO: 37 - protein, 22 aa, Artificial Sequence
  Synthesized
IWAPLAGTCGVLLLSLVITLYC

SEQ ID NO: 38 - protein, 22 aa, Artificial Sequence
  Synthesized
IWAPLAGTCGVLLLSLVITLYC

SEQ ID NO: 39 - protein, 270 aa, Artificial Sequence
  Synthesized
PEEPLVVKVEEGDNAVLQCLKGTSDGPTQQLTWSRESPLKPFLKLSLGLPGLGIHMRPLAIWLFIFNVSQQMGGFYLCQPGPPSEKAWQPGWTVNVEGSGELFRWNVSDLGGLGCGLKNRSSEGPSSPSGKLMSPKLYVWAKDRPEIWEGEPPCLPPRDSLNQSLSQDLTMAPGSTLWLSCGVPPDSVSRGPLSWTHVHPKGPKSLLSLELKDDRPARDMWVMETGLLLPRATAQDAGKYYCHRGNLTMSFHLEITARPVLWHWLLRTGG

SEQ ID NO: 40 - protein, 19 aa, Artificial Sequence
  Synthesized
IWAPLAGTCGVLLLSLVIT

SEQ ID NO: 41 - DNA, 339 bp, Artificial Sequence
  Synthesized
agagtgaagttcagcaggagcgcagacgcccccgcgtaccagcagggccagaaccagctctataacgagctcaatctaggacgaagagaggagtacgatgttttggacaagaggcgtggccgggaccctgagatggggggaaagccgagaaggaagaaccctcaggaaggcctgtacaatgaactgcagaaagataagatggcggaggcctacagtgagattgggatgaaaggcgagcgccggaggggcaaggggcacgatggcctttaccagggtctcagtacagccaccaaggacacctacgacgcccttcacatgcaggccctgccccctcgctaa

SEQ ID NO: 42 - DNA, 1689 bp, Artificial Sequence
  Synthesized
cggctccggtgcccgtcagtgggcagagcgcacatcgcccacagtccccgagaagttggggggaggggtcggcaattgaaccggtgcctagagaaggtggcgcggggtaaactgggaaagtgatgtcgtgtactggctccgcctttttcccgagggtgggggagaaccgtatataagtgcagtagtcgccgtgaacgttctttttcgcaacgggtttgccgccagaacacaggatccgccaccatggccttaccagtgaccgccttgctcctgccgctggccttgctgctccacgccgccaggccggacatccagctcacccagtccccgagctcgctgtccgcctccgtgggagatcgggtcaccatcacgtgccgcgccagccagtcgatttcctcctacctgaactggtaccaacagaagcccggaaaagccccgaagcttctcatctacgccgcctcgagcctgcagtcaggagtgccctcacggttctccggctccggttccggtactgatttcaccctgaccatttcctccctgcaaccggaggacttcgctacttactactgccagcagtcgtactccaccccctacactttcggacaaggcaccaaggtcgaaatcaagggtggcggtggctcgggcggtggtgggtcgggtggcggcggatctgaagtgcaattggtggaatcagggggaggacttgtgcagcctggaggatcgctgagactgtcatgtgccgtgtccggctttgccctgtccaaccacgggatgtcctgggtccgccgcgcgcctggaaagggcctcgaatgggtgtcgggtattgtgtacagcggtagcacctactatgccgcatccgtgaaggggagattcaccatcagccgggacaactccaggaacactctgtacctccaaatgaattcgctgaggccagaggacactgccatctactactgctccgcgcatggcggagagtccgacgtctggggacaggggaccaccgtgaccgtgtctagcaccacgacgccagcgccgcgaccaccaacaccggcgcccaccatcgcgtcgcagcccctgtccctgcgcccagaggcgtgccggccagcggcggggggcgcagtgcacacgagggggctggacttcgcctgtgatatctacatctgggcgcccttggccgggacttgtggggtccttctcctgtcactggttatcaccctttactgcaaacggggcagaaagaaactcctgtatatattcaaacaaccatttatgagaccagtacaaactactcaagaggaagatggctgtagctgccgatttccagaagaagaagaaggaggatgtgaactgagagtgaagttcagcaggagcgcagacgcccccgcgtaccagcagggccagaaccagctctataacgagctcaatctaggacgaagagaggagtacgatgttttggacaagaggcgtggccgggaccctgagatggggggaaagccgagaaggaagaaccctcaggaaggcctgtacaatgaactgcagaaagataagatggcggaggcctacagtgagattgggatgaaaggcgagcgccggaggggcaaggggcacgatggcctttaccagggtctcagtacagccaccaaggacacctacgacgcccttcacatgcaggccctgccccctcgctaa

SEQ ID NO: 43 - DNA, 1689 bp, Homo sapiens
cggctccggtgcccgtcagtgggcagagcgcacatcgcccacagtccccgagaagttggggggaggggtcggcaattgaaccggtgcctagagaaggtggcgcggggtaaactgggaaagtgatgtcgtgtactggctccgcctttttcccgagggtgggggagaaccgtatataagtgcagtagtcgccgtgaacgttctttttcgcaacgggtttgccgccagaacacaggatccgccaccatggccttaccagtgaccgccttgctcctgccgctggccttgctgctccacgccgccaggccggacatccagctcacccagtccccgagctcgctgtccgcctccgtgggagatcgggtcaccatcacgtgccgcgccagccagtcgatttcctcctacctgaactggtaccaacagaagcccggaaaagccccgaagcttctcatctacgccgcctcgagcctgcagtcaggagtgccctcacggttctccggctccggttccggtactgatttcaccctgaccatttcctccctgcaaccggaggacttcgctacttactactgccagcagtcgtactccaccccctacactttcggacaaggcaccaaggtcgaaatcaagggtggcggtggctcgggcggtggtgggtcgggtggcggcggatctgaagtgcaattggtggaatcagggggaggacttgtgcagcctggaggatcgctgagactgtcatgtgccgtgtccggctttgccctgtccaaccacgggatgtcctgggtccgccgcgcgcctggaaagggcctcgaatgggtgtcgggtattgtgtacagcggtagcacctactatgccgcatccgtgaaggggagattcaccatcagccgggacaactccaggaacactctgtacctccaaatgaattcgctgaggccagaggacactgccatctactactgctccgcgcatggcggagagtccgacgtctggggacaggggaccaccgtgaccgtgtctagcaccacgacgccagcgccgcgaccaccaacaccggcgcccaccatcgcgtcgcagcccctgtccctgcgcccagaggcgtgccggccagcggcggggggcgcagtgcacacgagggggctggacttcgcctgtgatatctacatctgggcgcccttggccgggacttgtggggtccttctcctgtcactggttatcaccctttactgcaaacggggcagaaagaaactcctgtatatattcaaacaaccatttatgagaccagtacaaactactcaagaggaagatggctgtagctgccgatttccagaagaagaagaaggaggatgtgaactgagagtgaagttcagcaggagcgcagacgcccccgcgtacaagcagggccagaaccagctctataacgagctcaatctaggacgaagagaggagtacgatgttttggacaagaggcgtggccgggaccctgagatggggggaaagccgagaaggaagaaccctcaggaaggcctgtacaatgaactgcagaaagataagatggcggaggcctacagtgagattgggatgaaaggcgagcgccggaggggcaaggggcacgatggcctttaccagggtctcagtacagccaccaaggacacctacgacgcccttcacatgcaggccctgccccctcgctaa

SEQ ID NO: 44 - DNA, 1689 bp, Artificial Sequence; identical to SEQ ID NO: 42
  Synthesized

SEQ ID NO: 45 - DNA, 1689 bp, Artificial Sequence; identical to SEQ ID NO: 43
  Synthesized

SEQ ID NO: 46 - protein, 106 aa, Artificial Sequence
  Synthesized
NIVMTQSPSSLSASVGDRVTITCQASQDVGTAVAWYQQKPDQSPKLLIYWTSTRHTGVPDRFTGSGSGTDFTLTISSLQPEDIATYFCHQYNSYNTFGSGTKLEIK

SEQ ID NO: 47 - protein, 120 aa, Artificial Sequence
  Synthesized
QVTLKESGPVLVKPTETLTLTCTFSGFSLSTSGMGVGWIRQAPGKGLEWVAHIWWDDDVYYNPSLKSRLTITKDASKDQVSLKLSSVTAADTAVYYCVRRRATGTGFDYWGQGTLVTVSS

SEQ ID NO: 48 - protein, 130 aa, Artificial Sequence
  Synthesized
METDTLLLWVLLLWVPGSTGDIVLTQSPALAVSLGQRATISCRASQSVSISSHDLMQWYQQKPGQQPKLLIYDAFNLASGIPVRFSGSGSGTDFTLTIDPVQADDIATYYCQQSKDDPYTFGAGTKLELK

SEQ ID NO: 49 - protein, 139 aa, Artificial Sequence
  Synthesized
MDIRLSLAFLVLFIKGVQCEVQLVESGGGLVQPGRSMKLSCAASGFTFSNYGMAWVRQAPTKGLEWVATISYDGSITYYRDSVKGRFTISRDHAKSTLYLQMNSLRSEDTATYYCTREEQYSSWYFDFWGPGIMVTVSS

SEQ ID NO: 50 - protein, 112 aa, Artificial Sequence
  Synthesized
DIVMTQSPDSLAVSLGERATINCKSSQSLLNSRTRKNYLAWYQQKPGQPPKLLIYWASTRESGVPDRFSGSGSGTDFTLTISSLQAEDVAVYYCTQSFILRTFGQGTKVEIK

SEQ ID NO: 51 - protein, 119 aa, Artificial Sequence
  Synthesized
EVQLVQSGAEVKKPGASVKVSCKASGYTFTNYYIHWVRQAPGQGLEWIGWIYPGDGNTKYNEKFKGRATLTADTSTSTAYLELSSLRSEDTAVYYCARDSYSNYYFDYWGQGTLVTVSS

SEQ ID NO: 52 - protein, 413 aa, Artificial Sequence
  Synthesized
MRPADLLQLVLLLDLPRDLGGMGCSSPPCECHQEEDFRVTCKDIQRIPSLPPSTQTLKLIETHLRTIPSHAFSNLPNISRIYVSIDVTLQQLESHSFYNLSKVTHIEIRNTRNLTYIDPDALKELPLLKFLGIFNTGLKMFPDLTKVYSTDIFFILEITDNPYMTSIPVNAFQGLCNETLTLKLYNNGFTSVQGYAFNGTKLDAVYLNKNKYLTVIDKDAFGGVYSGPSLLDVSQTSVTALPSKGLEHLKELIARNTWTLKKLPLSLSFLHLTRADLSYPSHCCAFKNQKKIRGILESLMCNESSMQSLRQRKSVNALNSPLHQEYEENLGDSIVGYKEKSKFQDTHNNAHYYVFFEEQEDEIIGFGQELKNPQEETLQAFDSHYDYTICGDSEDMVCTPKSDEFNPCEDIMG

SEQ ID NO: 53 - protein, 115 aa, Artificial Sequence
  Synthesized
EVQLLESGGGLVQPGGSLRLSCAASGFTFSSYAMNWVRQAPGKGLEWVSAILSSGGSTYYADSVKGRFTISRDNSKNTLYLQMNSLRAEDTAVYYCARYWPMDIWGQGTLVTVSS

SEQ ID NO: 54 - protein, 108 aa, Artificial Sequence
  Synthesized
EIVLTQSPGTLSLSPGERATLSCRGGQSVSSSYLAWYQQKPGQAPRLLMYDASIRATGIPDRFSGSGSGTDFTLTISRLEPEDFAVYYCQQYQSWPLTFGQGTKVEIK

SEQ ID NO: 55 - protein, 140 aa, Artificial Sequence
  Synthesized
MGWSCIILFLVATATGVHSEVQLVESGGGLMQPKGSLKLSCAASGFTFKTYALNWVRQAPGTGLEWVARIRSKSNNYTTYYADSVKDRFTISRDDSQNMLYLQMNNLKTEDTAMYYCVRPQSGTSFAYWGQGTLVTVSAA

SEQ ID NO: 56 - protein, 131 aa, Artificial Sequence
  Synthesized
MGWSCIILFLVATATGVHSNIVLTQSPASLAVSLGQRATISCRASESVDSYGNSFMHWYQQKPGQPPKLLIYLASNLESGVPARFSGSGSRTDFTLTIDPVEADDVATYYCQQNNGDPYTFGGGTKLEIIR

SEQ ID NO: 57 - protein, 120 aa, Artificial Sequence
  Synthesized
QVQLVQSGGGVVQPGKSLRLSCAASGFTFSIFAMHWVRQAPGKGLEWVATISYDGSNAFYADSVEGRFTISRDNSKDSLYLQMDSLRPEDTAVYYCVKAGDGGYDVFDSWGQGTLVTVSS

SEQ ID NO: 58 - protein, 111 aa, Artificial Sequence
  Synthesized
EIVMTQSPLSLPVTPGEPASISCRSSQSLLHSNGYNYLDWYLQKPGQSPQLLIYLGSNRASGVPDRFSGSGSGTDFTLKISRVEAEDVGVYYCMQALQTPTFGPGTKVDIK

SEQ ID NO: 59 - DNA, 1473 bp, Artificial Sequence
  Synthesized
atggccttaccagtgaccgccttgctcctgccgctggccttgctgctccacgccgccaggccggatatccagatgacccagagcccaagctccctgtccgcctctgtgggcgacagggtgaccatcacatgccgcgccagccagacaatctggtcctacctgaactggtatcagcagagacccggcaaggcccctaatctgctgatctacgcagcatctagcctgcagtctggagtgccctcccggttctctggaagaggatccggaaccgacttcaccctgacaatctcctctctgcaggccgaggacttcgccacatactattgccagcagagctattccatccctcagacctttggccagggcacaaagctggagatcaagggcggcggcggctctggaggaggaggaagcggaggaggaggatcccaggtgcagctgcagcagagcggaccaggactggtgaagccctcccagaccctgtctctgacatgtgccatcagcggcgattccgtgagctccaacagcgccgcctggaattggatccggcagtctcccagcagaggactggagtggctgggaaggacctactatcgctccaagtggtacaacgattatgccgtgtctgtgaagagccggatcaccatcaaccctgacacatctaagaatcagttcagcctgcagctgaattccgtgaccccagaggacacagccgtgtactattgtgcaagggaggtgaccggcgacctggaggatgcctttgacatctggggccagggcaccatggtgacagtgtctagcaccacgacgccagcgccgcgaccaccaacaccggcgcccaccatcgcgtcgcagcccctgtccctgcgcccagaggcgtgccggccagcggcggggggcgcagtgcacacgagggggctggacttcgcctgtgatatctacatctgggcgcccttggccgggacttgtggggtccttctcctgtcactggttatcaccctttactgcaaacggggcagaaagaaactcctgtatatattcaaacaaccatttatgagaccagtacaaactactcaagaggaagatggctgtagctgccgatttccagaagaagaagaaggaggatgtgaactgagagtgaagttcagcaggagcgcagacgcccccgcgtacaagcagggccagaaccagctctataacgagctcaatctaggacgaagagaggagtacgatgttttggacaagaggcgtggccgggaccctgagatggggggaaagccgagaaggaagaaccctcaggaaggcctgtacaatgaactgcagaaagataagatggcggaggcctacagtgagattgggatgaaaggcgagcgccggaggggcaaggggcacgatggcctttaccagggtctcagtacagccaccaaggacacctacgacgcccttcacatgcaggccctgccccctcgctaa

SEQ ID NO: 60 - DNA, 1446 bp, Artificial Sequence
  Synthesized
atggccttaccagtgaccgccttgctcctgccgctggccttgctgctccacgccgccaggccggacatccagctcacccagtccccgagctcgctgtccgcctccgtgggagatcgggtcaccatcacgtgccgcgccagccagtcgatttcctcctacctgaactggtaccaacagaagcccggaaaagccccgaagcttctcatctacgccgcctcgagcctgcagtcaggagtgccctcacggttctccggctccggttccggtactgatttcaccctgaccatttcctccctgcaaccggaggacttcgctacttactactgccagcagtcgtactccaccccctacactttcggacaaggcaccaaggtcgaaatcaagggtggcggtggctcgggcggtggtgggtcgggtggcggcggatctgaagtgcaattggtggaatcagggggaggacttgtgcagcctggaggatcgctgagactgtcatgtgccgtgtccggctttgccctgtccaaccacgggatgtcctgggtccgccgcgcgcctggaaagggcctcgaatgggtgtcgggtattgtgtacagcggtagcacctactatgccgcatccgtgaaggggagattcaccatcagccgggacaactccaggaacactctgtacctccaaatgaattcgctgaggccagaggacactgccatctactactgctccgcgcatggcggagagtccgacgtctggggacaggggaccaccgtgaccgtgtctagcaccacgacgccagcgccgcgaccaccaacaccggcgcccaccatcgcgtcgcagcccctgtccctgcgcccagaggcgtgccggccagcggcggggggcgcagtgcacacgagggggctggacttcgcctgtgatatctacatctgggcgcccttggccgggacttgtggggtccttctcctgtcactggttatcaccctttactgcaaacggggcagaaagaaactcctgtatatattcaaacaaccatttatgagaccagtacaaactactcaagaggaagatggctgtagctgccgatttccagaagaagaagaaggaggatgtgaactgagagtgaagttcagcaggagcgcagacgcccccgcgtacaagcagggccagaaccagctctataacgagctcaatctaggacgaagagaggagtacgatgttttggacaagaggcgtggccgggaccctgagatggggggaaagccgagaaggaagaaccctcaggaaggcctgtacaatgaactgcagaaagataagatggcggaggcctacagtgagattgggatgaaaggcgagcgccggaggggcaaggggcacgatggcctttaccagggtctcagtacagccaccaaggacacctacgacgcccttcacatgcaggccctgccccctcgctaa

SEQ ID NO: 61 - DNA, 1467 bp, Artificial Sequence
  Synthesized
atggccttaccagtgaccgccttgctcctgccgctggccttgctgctccacgccgccaggccggacatcgtgatgacccagtccccctccagcctgacagtgacagccggcgagaaggtgacaatgatctgtaagtccagccagagcctgctgaacagcggcgaccagaagaactacctgacctggtaccagcagaagcctggccagccccccaagctgctgatcttctgggccagcacaagggagagcggcgtgcccgacagattcacaggcagcggcagcggcaccgacttcacactgaccatttcctccgtgcaggccgaggacctcgccgtgtactactgccagaacgactactcctaccccctgacattcggcgccggcaccaaactggagctgaagggtggcggtggctcgggcggtggtgggtcgggtggcggcggatctcaggtgcagctccagcagtccgatgccgagctggtgaagcccggaagcagcgtcaagatcagctgtaaggcctccggctacaccttcacagaccacgccatccactgggtgaagcagaagcccgagcagggcctggagtggatcggccactttagccccggaaacaccgacatcaagtacaacgacaagttcaagggcaaggccaccctgaccgtggacaggagcagcagcaccgcctacatgcagctgaacagcctgacaagcgaggacagcgccgtgtacttctgcaagacctccaccttcttcttcgactactggggccagggaaccaccctgacagtgtccagcaccacgacgccagcgccgcgaccaccaacaccggcgcccaccatcgcgtcgcagcccctgtccctgcgcccagaggcgtgccggccagcggcggggggcgcagtgcacacgagggggctggacttcgcctgtgatatctacatctgggcgcccttggccgggacttgtggggtccttctcctgtcactggttatcaccctttactgcaaacggggcagaaagaaactcctgtatatattcaaacaaccatttatgagaccagtacaaactactcaagaggaagatggctgtagctgccgatttccagaagaagaagaaggaggatgtgaactgagagtgaagttcagcaggagcgcagacgcccccgcgtacaagcagggccagaaccagctctataacgagctcaatctaggacgaagagaggagtacgatgttttggacaagaggcgtggccgggaccctgagatggggggaaagccgagaaggaagaaccctcaggaaggcctgtacaatgaactgcagaaagataagatggcggaggcctacagtgagattgggatgaaaggcgagcgccggaggggcaaggggcacgatggcctttaccagggtctcagtacagccaccaaggacacctacgacgcccttcacatgcaggccctgccccctcgctaa

SEQ ID NO: 62 - DNA, 3533 bp, Artificial Sequence
  Synthesized
atggccttaccagtgaccgccttgctcctgccgctggccttgctgctccacgccgccaggccggacatccagatgacacagactacatcctccctgtctgcctctctgggagacagagtcaccatcagttgcagggcaagtcaggacattagtaaatatttaaattggtatcagcagaaaccagatggaactgttaaactcctgatctaccatacatcaagattacactcaggagtcccatcaaggttcagtggcagtgggtctggaacagattattctctcaccattagcaacctggagcaagaagatattgccacttacttttgccaacagggtaatacgcttccgtacacgttcggaggggggaccaagctggagatcacaggtggcggtggctcgggcggtggtgggtcgggtggcggcggatctgaggtgaaactgcaggagtcaggacctggcctggtggcgccctcacagagcctgtccgtcacatgcactgtctcaggggtctcattacccgactatggtgtaagctggattcgccagcctccacgaaagggtctggagtggctgggagtaatatggggtagtgaaaccacatactataattcagctctcaaatccagactgaccatcatcaaggacaactccaagagccaagttttcttaaaaatgaacagtctgcaaactgatgacacagccatttactactgtgccaaacattattactacggtggtagctatgctatggactactggggccaaggaacctcagtcaccgtctcctcaaccacgacgccagcgccgcgaccaccaacaccggcgcccaccatcgcgtcgcagcccctgtccctgcgcccagaggcgtgccggccagcggcggggggcgcagtgcacacgagggggctggacttcgcctgtgatatctacatctgggcgcccttggccgggacttgtggggtccttctcctgtcactggttatcaccctttactgcaaacggggcagaaagaaactcctgtatatattcaaacaaccatttatgagaccagtacaaactactcaagaggaagatggctgtagctgccgatttccagaagaagaagaaggaggatgtgaactgagagtgaagttcagcaggagcgcagacgcccccgcgtacaagcagggccagaaccagctctataacgagctcaatctaggacgaagagaggagtacgatgttttggacaagaggcgtggccgggaccctgagatggggggaaagccgagaaggaagaaccctcaggaaggcctgtacaatgaactgcagaaagataagatggcggaggcctacagtgagattgggatgaaaggcgagcgccggaggggcaaggggcacgatggcctttaccagggtctcagtacagccaccaaggacacctacgacgcccttcacatgcaggccctgccccctcgctaatctagaggcgcgcccctctccctcccccccccctaacgttactggccgaagccgcttggaataaggccggtgtgcgtttgtctatatgttattttccaccatattgccgtcttttggcaatgtgagggcccggaaacctggccctgtcttcttgacgagcattcctaggggtctttcccctctcgccaaaggaatgcaaggtctgttgaatgtcgtgaaggaagcagttcctctggaagcttcttgaagacaaacaacgtctgtagcgaccctttgcaggcagcggaaccccccacctggcgacaggtgcctctgcggccaaaagccacgtgtataagatacacctgcaaaggcggcacaaccccagtgccacgttgtgagttggatagttgtggaaagagtcaaatggctctcctcaagcgtattcaacaaggggctgaaggatgcccagaaggtaccccattgtatgggatctgatctggggcctcggtacacatgctttacatgtgtttagtcgaggttaaaaaaacgtctaggccccccgaaccacggggacgtggttttcctttgaaaaacacgatgataatatggccacaacccatatgatggccttaccagtgaccgccttgctcctgccgctggccttgctgctccacgccgccaggccggacatcgtgatgacccagtccccctccagcctgacagtgacagccggcgagaaggtgacaatgatctgtaagtccagccagagcctgctgaacagcggcgaccagaagaactacctgacctggtaccagcagaagcctggccagccccccaagctgctgatcttctgggccagcacaagggagagcggcgtgcccgacagattcacaggcagcggcagcggcaccgacttcacactgaccatttcctccgtgcaggccgaggacctcgccgtgtactactgccagaacgactactcctaccccctgacattcggcgccggcaccaaactggagctgaagggtggcggtggctcgggcggtggtgggtcgggtggcggcggatctcaggtgcagctccagcagtccgatgccgagctggtgaagcccggaagcagcgtcaagatcagctgtaaggcctccggctacaccttcacagaccacgccatccactgggtgaagcagaagcccgagcagggcctggagtggatcggccactttagccccggaaacaccgacatcaagtacaacgacaagttcaagggcaaggccaccctgaccgtggacaggagcagcagcaccgcctacatgcagctgaacagcctgacaagcgaggacagcgccgtgtacttctgcaagacctccaccttcttcttcgactactggggccagggaaccaccctgacagtgtccagcaccacgacgccagcgccgcgaccaccaacaccggcgcccaccatcgcgtcgcagcccctgtccctgcgcccagaggcgtgccggccagcggcggggggcgcagtgcacacgagggggctggacttcgcctgtgatatctacatctgggcgcccttggccgggacttgtggggtccttctcctgtcactggttatcaccctttactgcaaacggggcagaaagaaactcctgtatatattcaaacaaccatttatgagaccagtacaaactactcaagaggaagatggctgtagctgccgatttccagaagaagaagaaggaggatgtgaactgagagtgaagttcagcaggagcgcagacgcccccgcgtacaagcagggccagaaccagctctataacgagctcaatctaggacgaagagaggagtacgatgttttggacaagaggcgtggccgggaccctgagatggggggaaagccgagaaggaagaaccctcaggaaggcctgtacaatgaactgcagaaagataagatggcggaggcctacagtgagattgggatgaaaggcgagcgccggaggggcaaggggcacgatggcctttaccagggtctcagtacagccaccaaggacacctacgacgcccttcacatgcaggccctgccccctcgctaa

SEQ ID NO: 63 - DNA, 3533 bp, Artificial Sequence
  Synthesized
atggccttaccagtgaccgccttgctcctgccgctggccttgctgctccacgccgccaggccggatatccagatgacccagagcccgagcagcctgagcgcgagcgtgggtgatcgcgtgaccattacctgcagggcaagtcaggacattagtaaatatttaaattggtatcagcagaaaccgggtaaagcgccgaaactgttaatttatcatacatcaagattacactcaggcgtgccgtcgcgttttagcggctcgggttcgggcaccgattttaccctgaccatctcgagcttgcagccggaggacttcgccacctactattgccaacagggtaatacgcttccgtacacgttcggtcagggcaccaaagtggagatcaaaggtggcggtggctcgggcggtggtgggtcgggtggcggcggatctgaggtgcagctggtggagtctgggggaggcttggtacagcctggggggtccctgagactctcctgtgcagcctctggagtgtccctgcctgattatggcgtgtcctgggtccgccaggctccagggaaggggctggagtgggtttcagtgatctggggcagcgagacaacctactacaacagcgccctgaagtcccgattcaccatctccagagacaatgccaagaactcactgtatctgcaaatgaacagcctgagagccgaggacacggctgtgtattactgtgcgaagcactactactacggcggcagctacgctatggactactggggccaaggaaccctggtcaccgtgtcctcaaccacgacgccagcgccgcgaccaccaacaccggcgcccaccatcgcgtcgcagcccctgtccctgcgcccagaggcgtgccggccagcggcggggggcgcagtgcacacgagggggctggacttcgcctgtgatatctacatctgggcgcccttggccgggacttgtggggtccttctcctgtcactggttatcaccctttactgcaaacggggcagaaagaaactcctgtatatattcaaacaaccatttatgagaccagtacaaactactcaagaggaagatggctgtagctgccgatttccagaagaagaagaaggaggatgtgaactgagagtgaagttcagcaggagcgcagacgcccccgcgtacaagcagggccagaaccagctctataacgagctcaatctaggacgaagagaggagtacgatgttttggacaagaggcgtggccgggaccctgagatggggggaaagccgagaaggaagaaccctcaggaaggcctgtacaatgaactgcagaaagataagatggcggaggcctacagtgagattgggatgaaaggcgagcgccggaggggcaaggggcacgatggcctttaccagggtctcagtacagccaccaaggacacctacgacgcccttcacatgcaggccctgccccctcgctaatctagaggcgcgcccctctccctcccccccccctaacgttactggccgaagccgcttggaataaggccggtgtgcgtttgtctatatgttattttccaccatattgccgtcttttggcaatgtgagggcccggaaacctggccctgtcttcttgacgagcattcctaggggtctttcccctctcgccaaaggaatgcaaggtctgttgaatgtcgtgaaggaagcagttcctctggaagcttcttgaagacaaacaacgtctgtagcgaccctttgcaggcagcggaaccccccacctggcgacaggtgcctctgcggccaaaagccacgtgtataagatacacctgcaaaggcggcacaaccccagtgccacgttgtgagttggatagttgtggaaagagtcaaatggctctcctcaagcgtattcaacaaggggctgaaggatgcccagaaggtaccccattgtatgggatctgatctggggcctcggtacacatgctttacatgtgtttagtcgaggttaaaaaaacgtctaggccccccgaaccacggggacgtggttttcctttgaaaaacacgatgataatatggccacaacccatatgatggccttaccagtgaccgccttgctcctgccgctggccttgctgctccacgccgccaggccggacatcgtgatgacccagtccccctccagcctgacagtgacagccggcgagaaggtgacaatgatctgtaagtccagccagagcctgctgaacagcggcgaccagaagaactacctgacctggtaccagcagaagcctggccagccccccaagctgctgatcttctgggccagcacaagggagagcggcgtgcccgacagattcacaggcagcggcagcggcaccgacttcacactgaccatttcctccgtgcaggccgaggacctcgccgtgtactactgccagaacgactactcctaccccctgacattcggcgccggcaccaaactggagctgaagggtggcggtggctcgggcggtggtgggtcgggtggcggcggatctcaggtgcagctccagcagtccgatgccgagctggtgaagcccggaagcagcgtcaagatcagctgtaaggcctccggctacaccttcacagaccacgccatccactgggtgaagcagaagcccgagcagggcctggagtggatcggccactttagccccggaaacaccgacatcaagtacaacgacaagttcaagggcaaggccaccctgaccgtggacaggagcagcagcaccgcctacatgcagctgaacagcctgacaagcgaggacagcgccgtgtacttctgcaagacctccaccttcttcttcgactactggggccagggaaccaccctgacagtgtccagcaccacgacgccagcgccgcgaccaccaacaccggcgcccaccatcgcgtcgcagcccctgtccctgcgcccagaggcgtgccggccagcggcggggggcgcagtgcacacgagggggctggacttcgcctgtgatatctacatctgggcgcccttggccgggacttgtggggtccttctcctgtcactggttatcaccctttactgcaaacggggcagaaagaaactcctgtatatattcaaacaaccatttatgagaccagtacaaactactcaagaggaagatggctgtagctgccgatttccagaagaagaagaaggaggatgtgaactgagagtgaagttcagcaggagcgcagacgcccccgcgtacaagcagggccagaaccagctctataacgagctcaatctaggacgaagagaggagtacgatgttttggacaagaggcgtggccgggaccctgagatggggggaaagccgagaaggaagaaccctcaggaaggcctgtacaatgaactgcagaaagataagatggcggaggcctacagtgagattgggatgaaaggcgagcgccggaggggcaaggggcacgatggcctttaccagggtctcagtacagccaccaaggacacctacgacgcccttcacatgcaggccctgccccctcgctaa

SEQ ID NO: 64 - DNA, 3545 bp, Artificial Sequence
  Synthesized
atggccttaccagtgaccgccttgctcctgccgctggccttgctgctccacgccgccaggccggatatccagatgacccagagcccaagctccctgtccgcctctgtgggcgacagggtgaccatcacatgccgcgccagccagacaatctggtcctacctgaactggtatcagcagagacccggcaaggcccctaatctgctgatctacgcagcatctagcctgcagtctggagtgccctcccggttctctggaagaggatccggaaccgacttcaccctgacaatctcctctctgcaggccgaggacttcgccacatactattgccagcagagctattccatccctcagacctttggccagggcacaaagctggagatcaagggcggcggcggctctggaggaggaggaagcggaggaggaggatcccaggtgcagctgcagcagagcggaccaggactggtgaagccctcccagaccctgtctctgacatgtgccatcagcggcgattccgtgagctccaacagcgccgcctggaattggatccggcagtctcccagcagaggactggagtggctgggaaggacctactatcgctccaagtggtacaacgattatgccgtgtctgtgaagagccggatcaccatcaaccctgacacatctaagaatcagttcagcctgcagctgaattccgtgaccccagaggacacagccgtgtactattgtgcaagggaggtgaccggcgacctggaggatgcctttgacatctggggccagggcaccatggtgacagtgtctagcaccacgacgccagcgccgcgaccaccaacaccggcgcccaccatcgcgtcgcagcccctgtccctgcgcccagaggcgtgccggccagcggcggggggcgcagtgcacacgagggggctggacttcgcctgtgatatctacatctgggcgcccttggccgggacttgtggggtccttctcctgtcactggttatcaccctttactgcaaacggggcagaaagaaactcctgtatatattcaaacaaccatttatgagaccagtacaaactactcaagaggaagatggctgtagctgccgatttccagaagaagaagaaggaggatgtgaactgagagtgaagttcagcaggagcgcagacgcccccgcgtacaagcagggccagaaccagctctataacgagctcaatctaggacgaagagaggagtacgatgttttggacaagaggcgtggccgggaccctgagatggggggaaagccgagaaggaagaaccctcaggaaggcctgtacaatgaactgcagaaagataagatggcggaggcctacagtgagattgggatgaaaggcgagcgccggaggggcaaggggcacgatggcctttaccagggtctcagtacagccaccaaggacacctacgacgcccttcacatgcaggccctgccccctcgctaatctagaggcgcgcccctctccctcccccccccctaacgttactggccgaagccgcttggaataaggccggtgtgcgtttgtctatatgttattttccaccatattgccgtcttttggcaatgtgagggcccggaaacctggccctgtcttcttgacgagcattcctaggggtctttcccctctcgccaaaggaatgcaaggtctgttgaatgtcgtgaaggaagcagttcctctggaagcttcttgaagacaaacaacgtctgtagcgaccctttgcaggcagcggaaccccccacctggcgacaggtgcctctgcggccaaaagccacgtgtataagatacacctgcaaaggcggcacaaccccagtgccacgttgtgagttggatagttgtggaaagagtcaaatggctctcctcaagcgtattcaacaaggggctgaaggatgcccagaaggtaccccattgtatgggatctgatctggggcctcggtacacatgctttacatgtgtttagtcgaggttaaaaaaacgtctaggccccccgaaccacggggacgtggttttcctttgaaaaacacgatgataatatggccacaacccatatgatggccttaccagtgaccgccttgctcctgccgctggccttgctgctccacgccgccaggccggacatcgtgatgacccagtccccctccagcctgacagtgacagccggcgagaaggtgacaatgatctgtaagtccagccagagcctgctgaacagcggcgaccagaagaactacctgacctggtaccagcagaagcctggccagccccccaagctgctgatcttctgggccagcacaagggagagcggcgtgcccgacagattcacaggcagcggcagcggcaccgacttcacactgaccatttcctccgtgcaggccgaggacctcgccgtgtactactgccagaacgactactcctaccccctgacattcggcgccggcaccaaactggagctgaagggtggcggtggctcgggcggtggtgggtcgggtggcggcggatctcaggtgcagctccagcagtccgatgccgagctggtgaagcccggaagcagcgtcaagatcagctgtaaggcctccggctacaccttcacagaccacgccatccactgggtgaagcagaagcccgagcagggcctggagtggatcggccactttagccccggaaacaccgacatcaagtacaacgacaagttcaagggcaaggccaccctgaccgtggacaggagcagcagcaccgcctacatgcagctgaacagcctgacaagcgaggacagcgccgtgtacttctgcaagacctccaccttcttcttcgactactggggccagggaaccaccctgacagtgtccagcaccacgacgccagcgccgcgaccaccaacaccggcgcccaccatcgcgtcgcagcccctgtccctgcgcccagaggcgtgccggccagcggcggggggcgcagtgcacacgagggggctggacttcgcctgtgatatctacatctgggcgcccttggccgggacttgtggggtccttctcctgtcactggttatcaccctttactgcaaacggggcagaaagaaactcctgtatatattcaaacaaccatttatgagaccagtacaaactactcaagaggaagatggctgtagctgccgatttccagaagaagaagaaggaggatgtgaactgagagtgaagttcagcaggagcgcagacgcccccgcgtacaagcagggccagaaccagctctataacgagctcaatctaggacgaagagaggagtacgatgttttggacaagaggcgtggccgggaccctgagatggggggaaagccgagaaggaagaaccctcaggaaggcctgtacaatgaactgcagaaagataagatggcggaggcctacagtgagattgggatgaaaggcgagcgccggaggggcaaggggcacgatggcctttaccagggtctcagtacagccaccaaggacacctacgacgcccttcacatgcaggccctgccccctcgctaa

SEQ ID NO: 65 - DNA, 3518 bp, Artificial Sequence
  Synthesized
atggccttaccagtgaccgccttgctcctgccgctggccttgctgctccacgccgccaggccggacatccagctcacccagtccccgagctcgctgtccgcctccgtgggagatcgggtcaccatcacgtgccgcgccagccagtcgatttcctcctacctgaactggtaccaacagaagcccggaaaagccccgaagcttctcatctacgccgcctcgagcctgcagtcaggagtgccctcacggttctccggctccggttccggtactgatttcaccctgaccatttcctccctgcaaccggaggacttcgctacttactactgccagcagtcgtactccaccccctacactttcggacaaggcaccaaggtcgaaatcaagggtggcggtggctcgggcggtggtgggtcgggtggcggcggatctgaagtgcaattggtggaatcagggggaggacttgtgcagcctggaggatcgctgagactgtcatgtgccgtgtccggctttgccctgtccaaccacgggatgtcctgggtccgccgcgcgcctggaaagggcctcgaatgggtgtcgggtattgtgtacagcggtagcacctactatgccgcatccgtgaaggggagattcaccatcagccgggacaactccaggaacactctgtacctccaaatgaattcgctgaggccagaggacactgccatctactactgctccgcgcatggcggagagtccgacgtctggggacaggggaccaccgtgaccgtgtctagcaccacgacgccagcgccgcgaccaccaacaccggcgcccaccatcgcgtcgcagcccctgtccctgcgcccagaggcgtgccggccagcggcggggggcgcagtgcacacgagggggctggacttcgcctgtgatatctacatctgggcgcccttggccgggacttgtggggtccttctcctgtcactggttatcaccctttactgcaaacggggcagaaagaaactcctgtatatattcaaacaaccatttatgagaccagtacaaactactcaagaggaagatggctgtagctgccgatttccagaagaagaagaaggaggatgtgaactgagagtgaagttcagcaggagcgcagacgcccccgcgtacaagcagggccagaaccagctctataacgagctcaatctaggacgaagagaggagtacgatgttttggacaagaggcgtggccgggaccctgagatggggggaaagccgagaaggaagaaccctcaggaaggcctgtacaatgaactgcagaaagataagatggcggaggcctacagtgagattgggatgaaaggcgagcgccggaggggcaaggggcacgatggcctttaccagggtctcagtacagccaccaaggacacctacgacgcccttcacatgcaggccctgccccctcgctaatctagaggcgcgcccctctccctcccccccccctaacgttactggccgaagccgcttggaataaggccggtgtgcgtttgtctatatgttattttccaccatattgccgtcttttggcaatgtgagggcccggaaacctggccctgtcttcttgacgagcattcctaggggtctttcccctctcgccaaaggaatgcaaggtctgttgaatgtcgtgaaggaagcagttcctctggaagcttcttgaagacaaacaacgtctgtagcgaccctttgcaggcagcggaaccccccacctggcgacaggtgcctctgcggccaaaagccacgtgtataagatacacctgcaaaggcggcacaaccccagtgccacgttgtgagttggatagttgtggaaagagtcaaatggctctcctcaagcgtattcaacaaggggctgaaggatgcccagaaggtaccccattgtatgggatctgatctggggcctcggtacacatgctttacatgtgtttagtcgaggttaaaaaaacgtctaggccccccgaaccacggggacgtggttttcctttgaaaaacacgatgataatatggccacaacccatatgatggccttaccagtgaccgccttgctcctgccgctggccttgctgctccacgccgccaggccggacatcgtgatgacccagtccccctccagcctgacagtgacagccggcgagaaggtgacaatgatctgtaagtccagccagagcctgctgaacagcggcgaccagaagaactacctgacctggtaccagcagaagcctggccagccccccaagctgctgatcttctgggccagcacaagggagagcggcgtgcccgacagattcacaggcagcggcagcggcaccgacttcacactgaccatttcctccgtgcaggccgaggacctcgccgtgtactactgccagaacgactactcctaccccctgacattcggcgccggcaccaaactggagctgaagggtggcggtggctcgggcggtggtgggtcgggtggcggcggatctcaggtgcagctccagcagtccgatgccgagctggtgaagcccggaagcagcgtcaagatcagctgtaaggcctccggctacaccttcacagaccacgccatccactgggtgaagcagaagcccgagcagggcctggagtggatcggccactttagccccggaaacaccgacatcaagtacaacgacaagttcaagggcaaggccaccctgaccgtggacaggagcagcagcaccgcctacatgcagctgaacagcctgacaagcgaggacagcgccgtgtacttctgcaagacctccaccttcttcttcgactactggggccagggaaccaccctgacagtgtccagcaccacgacgccagcgccgcgaccaccaacaccggcgcccaccatcgcgtcgcagcccctgtccctgcgcccagaggcgtgccggccagcggcggggggcgcagtgcacacgagggggctggacttcgcctgtgatatctacatctgggcgcccttggccgggacttgtggggtccttctcctgtcactggttatcaccctttactgcaaacggggcagaaagaaactcctgtatatattcaaacaaccatttatgagaccagtacaaactactcaagaggaagatggctgtagctgccgatttccagaagaagaagaaggaggatgtgaactgagagtgaagttcagcaggagcgcagacgcccccgcgtacaagcagggccagaaccagctctataacgagctcaatctaggacgaagagaggagtacgatgttttggacaagaggcgtggccgggaccctgagatggggggaaagccgagaaggaagaaccctcaggaaggcctgtacaatgaactgcagaaagataagatggcggaggcctacagtgagattgggatgaaaggcgagcgccggaggggcaaggggcacgatggcctttaccagggtctcagtacagccaccaaggacacctacgacgcccttcacatgcaggccctgccccctcgctaa

SEQ ID NO: 66 - DNA, 2994 bp, Artificial Sequence
  Synthesized
atggccttaccagtgaccgccttgctcctgccgctggccttgctgctccacgccgccaggccggacatccagatgacacagactacatcctccctgtctgcctctctgggagacagagtcaccatcagttgcagggcaagtcaggacattagtaaatatttaaattggtatcagcagaaaccagatggaactgttaaactcctgatctaccatacatcaagattacactcaggagtcccatcaaggttcagtggcagtgggtctggaacagattattctctcaccattagcaacctggagcaagaagatattgccacttacttttgccaacagggtaatacgcttccgtacacgttcggaggggggaccaagctggagatcacaggtggcggtggctcgggcggtggtgggtcgggtggcggcggatctgaggtgaaactgcaggagtcaggacctggcctggtggcgccctcacagagcctgtccgtcacatgcactgtctcaggggtctcattacccgactatggtgtaagctggattcgccagcctccacgaaagggtctggagtggctgggagtaatatggggtagtgaaaccacatactataattcagctctcaaatccagactgaccatcatcaaggacaactccaagagccaagttttcttaaaaatgaacagtctgcaaactgatgacacagccatttactactgtgccaaacattattactacggtggtagctatgctatggactactggggccaaggaacctcagtcaccgtctcctcaaccacgacgccagcgccgcgaccaccaacaccggcgcccaccatcgcgtcgcagcccctgtccctgcgcccagaggcgtgccggccagcggcggggggcgcagtgcacacgagggggctggacttcgcctgtgatatctacatctgggcgcccttggccgggacttgtggggtccttctcctgtcactggttatcaccctttactgcaaacggggcagaaagaaactcctgtatatattcaaacaaccatttatgagaccagtacaaactactcaagaggaagatggctgtagctgccgatttccagaagaagaagaaggaggatgtgaactgagagtgaagttcagcaggagcgcagacgcccccgcgtacaagcagggccagaaccagctctataacgagctcaatctaggacgaagagaggagtacgatgttttggacaagaggcgtggccgggaccctgagatggggggaaagccgagaaggaagaaccctcaggaaggcctgtacaatgaactgcagaaagataagatggcggaggcctacagtgagattgggatgaaaggcgagcgccggaggggcaaggggcacgatggcctttaccagggtctcagtacagccaccaaggacacctacgacgcccttcacatgcaggccctgccccctcgctctagagccacgaacttctctctgttaaagcaagcaggagacgtggaagaaaaccccggtcctcatatgatggccttaccagtgaccgccttgctcctgccgctggccttgctgctccacgccgccaggccggacatcgtgatgacccagtccccctccagcctgacagtgacagccggcgagaaggtgacaatgatctgtaagtccagccagagcctgctgaacagcggcgaccagaagaactacctgacctggtaccagcagaagcctggccagccccccaagctgctgatcttctgggccagcacaagggagagcggcgtgcccgacagattcacaggcagcggcagcggcaccgacttcacactgaccatttcctccgtgcaggccgaggacctcgccgtgtactactgccagaacgactactcctaccccctgacattcggcgccggcaccaaactggagctgaagggtggcggtggctcgggcggtggtgggtcgggtggcggcggatctcaggtgcagctccagcagtccgatgccgagctggtgaagcccggaagcagcgtcaagatcagctgtaaggcctccggctacaccttcacagaccacgccatccactgggtgaagcagaagcccgagcagggcctggagtggatcggccactttagccccggaaacaccgacatcaagtacaacgacaagttcaagggcaaggccaccctgaccgtggacaggagcagcagcaccgcctacatgcagctgaacagcctgacaagcgaggacagcgccgtgtacttctgcaagacctccaccttcttcttcgactactggggccagggaaccaccctgacagtgtccagcaccacgacgccagcgccgcgaccaccaacaccggcgcccaccatcgcgtcgcagcccctgtccctgcgcccagaggcgtgccggccagcggcggggggcgcagtgcacacgagggggctggacttcgcctgtgatatctacatctgggcgcccttggccgggacttgtggggtccttctcctgtcactggttatcaccctttactgcaaacggggcagaaagaaactcctgtatatattcaaacaaccatttatgagaccagtacaaactactcaagaggaagatggctgtagctgccgatttccagaagaagaagaaggaggatgtgaactgagagtgaagttcagcaggagcgcagacgcccccgcgtacaagcagggccagaaccagctctataacgagctcaatctaggacgaagagaggagtacgatgttttggacaagaggcgtggccgggaccctgagatggggggaaagccgagaaggaagaaccctcaggaaggcctgtacaatgaactgcagaaagataagatggcggaggcctacagtgagattgggatgaaaggcgagcgccggaggggcaaggggcacgatggcctttaccagggtctcagtacagccaccaaggacacctacgacgcccttcacatgcaggccctgccccctcgctaa

SEQ ID NO: 67 - DNA, 2994 bp, Artificial Sequence
  Synthesized
atggccttaccagtgaccgccttgctcctgccgctggccttgctgctccacgccgccaggccggatatccagatgacccagagcccgagcagcctgagcgcgagcgtgggtgatcgcgtgaccattacctgcagggcaagtcaggacattagtaaatatttaaattggtatcagcagaaaccgggtaaagcgccgaaactgttaatttatcatacatcaagattacactcaggcgtgccgtcgcgttttagcggctcgggttcgggcaccgattttaccctgaccatctcgagcttgcagccggaggacttcgccacctactattgccaacagggtaatacgcttccgtacacgttcggtcagggcaccaaagtggagatcaaaggtggcggtggctcgggcggtggtgggtcgggtggcggcggatctgaggtgcagctggtggagtctgggggaggcttggtacagcctggggggtccctgagactctcctgtgcagcctctggagtgtccctgcctgattatggcgtgtcctgggtccgccaggctccagggaaggggctggagtgggtttcagtgatctggggcagcgagacaacctactacaacagcgccctgaagtcccgattcaccatctccagagacaatgccaagaactcactgtatctgcaaatgaacagcctgagagccgaggacacggctgtgtattactgtgcgaagcactactactacggcggcagctacgctatggactactggggccaaggaaccctggtcaccgtgtcctcaaccacgacgccagcgccgcgaccaccaacaccggcgcccaccatcgcgtcgcagcccctgtccctgcgcccagaggcgtgccggccagcggcggggggcgcagtgcacacgagggggctggacttcgcctgtgatatctacatctgggcgcccttggccgggacttgtggggtccttctcctgtcactggttatcaccctttactgcaaacggggcagaaagaaactcctgtatatattcaaacaaccatttatgagaccagtacaaactactcaagaggaagatggctgtagctgccgatttccagaagaagaagaaggaggatgtgaactgagagtgaagttcagcaggagcgcagacgcccccgcgtacaagcagggccagaaccagctctataacgagctcaatctaggacgaagagaggagtacgatgttttggacaagaggcgtggccgggaccctgagatggggggaaagccgagaaggaagaaccctcaggaaggcctgtacaatgaactgcagaaagataagatggcggaggcctacagtgagattgggatgaaaggcgagcgccggaggggcaaggggcacgatggcctttaccagggtctcagtacagccaccaaggacacctacgacgcccttcacatgcaggccctgccccctcgctctagagccacgaacttctctctgttaaagcaagcaggagacgtggaagaaaaccccggtcctcatatgatggccttaccagtgaccgccttgctcctgccgctggccttgctgctccacgccgccaggccggacatcgtgatgacccagtccccctccagcctgacagtgacagccggcgagaaggtgacaatgatctgtaagtccagccagagcctgctgaacagcggcgaccagaagaactacctgacctggtaccagcagaagcctggccagccccccaagctgctgatcttctgggccagcacaagggagagcggcgtgcccgacagattcacaggcagcggcagcggcaccgacttcacactgaccatttcctccgtgcaggccgaggacctcgccgtgtactactgccagaacgactactcctaccccctgacattcggcgccggcaccaaactggagctgaagggtggcggtggctcgggcggtggtgggtcgggtggcggcggatctcaggtgcagctccagcagtccgatgccgagctggtgaagcccggaagcagcgtcaagatcagctgtaaggcctccggctacaccttcacagaccacgccatccactgggtgaagcagaagcccgagcagggcctggagtggatcggccactttagccccggaaacaccgacatcaagtacaacgacaagttcaagggcaaggccaccctgaccgtggacaggagcagcagcaccgcctacatgcagctgaacagcctgacaagcgaggacagcgccgtgtacttctgcaagacctccaccttcttcttcgactactggggccagggaaccaccctgacagtgtccagcaccacgacgccagcgccgcgaccaccaacaccggcgcccaccatcgcgtcgcagcccctgtccctgcgcccagaggcgtgccggccagcggcggggggcgcagtgcacacgagggggctggacttcgcctgtgatatctacatctgggcgcccttggccgggacttgtggggtccttctcctgtcactggttatcaccctttactgcaaacggggcagaaagaaactcctgtatatattcaaacaaccatttatgagaccagtacaaactactcaagaggaagatggctgtagctgccgatttccagaagaagaagaaggaggatgtgaactgagagtgaagttcagcaggagcgcagacgcccccgcgtacaagcagggccagaaccagctctataacgagctcaatctaggacgaagagaggagtacgatgttttggacaagaggcgtggccgggaccctgagatggggggaaagccgagaaggaagaaccctcaggaaggcctgtacaatgaactgcagaaagataagatggcggaggcctacagtgagattgggatgaaaggcgagcgccggaggggcaaggggcacgatggcctttaccagggtctcagtacagccaccaaggacacctacgacgcccttcacatgcaggccctgccccctcgctaa

SEQ ID NO: 68 - DNA, 3009 bp, Artificial Sequence
  Synthesized
atggccttaccagtgaccgccttgctcctgccgctggccttgctgctccacgccgccaggccggatatccagatgacccagagcccaagctccctgtccgcctctgtgggcgacagggtgaccatcacatgccgcgccagccagacaatctggtcctacctgaactggtatcagcagagacccggcaaggcccctaatctgctgatctacgcagcatctagcctgcagtctggagtgccctcccggttctctggaagaggatccggaaccgacttcaccctgacaatctcctctctgcaggccgaggacttcgccacatactattgccagcagagctattccatccctcagacctttggccagggcacaaagctggagatcaagggcggcggcggctctggaggaggaggaagcggaggaggaggatcccaggtgcagctgcagcagagcggaccaggactggtgaagccctcccagaccctgtctctgacatgtgccatcagcggcgattccgtgagctccaacagcgccgcctggaattggatccggcagtctcccagcagaggactggagtggctgggaaggacctactatcgctccaagtggtacaacgattatgccgtgtctgtgaagagccggatcaccatcaaccctgacacatctaagaatcagttcagcctgcagctgaattccgtgaccccagaggacacagccgtgtactattgtgcaagggaggtgaccggcgacctggaggatgcctttgacatctggggccagggcaccatggtgacagtgtctagcaccacgacgccagcgccgcgaccaccaacaccggcgcccaccatcgcgtcgcagcccctgtccctgcgcccagaggcgtgccggccagcggcggggggcgcagtgcacacgagggggctggacttcgcctgtgatatctacatctgggcgcccttggccgggacttgtggggtccttctcctgtcactggttatcaccctttactgcaaacggggcagaaagaaactcctgtatatattcaaacaaccatttatgagaccagtacaaactactcaagaggaagatggctgtagctgccgatttccagaagaagaagaaggaggatgtgaactgagagtgaagttcagcaggagcgcagacgcccccgcgtacaagcagggccagaaccagctctataacgagctcaatctaggacgaagagaggagtacgatgttttggacaagaggcgtggccgggaccctgagatggggggaaagccgagaaggaagaaccctcaggaaggcctgtacaatgaactgcagaaagataagatggcggaggcctacagtgagattgggatgaaaggcgagcgccggaggggcaaggggcacgatggcctttaccagggtctcagtacagccaccaaggacacctacgacgcccttcacatgcaggccctgccccctcgctaatctagagccacgaacttctctctgttaaagcaagcaggagacgtggaagaaaaccccggtcctcatatgatggccttaccagtgaccgccttgctcctgccgctggccttgctgctccacgccgccaggccggacatcgtgatgacccagtccccctccagcctgacagtgacagccggcgagaaggtgacaatgatctgtaagtccagccagagcctgctgaacagcggcgaccagaagaactacctgacctggtaccagcagaagcctggccagccccccaagctgctgatcttctgggccagcacaagggagagcggcgtgcccgacagattcacaggcagcggcagcggcaccgacttcacactgaccatttcctccgtgcaggccgaggacctcgccgtgtactactgccagaacgactactcctaccccctgacattcggcgccggcaccaaactggagctgaagggtggcggtggctcgggcggtggtgggtcgggtggcggcggatctcaggtgcagctccagcagtccgatgccgagctggtgaagcccggaagcagcgtcaagatcagctgtaaggcctccggctacaccttcacagaccacgccatccactgggtgaagcagaagcccgagcagggcctggagtggatcggccactttagccccggaaacaccgacatcaagtacaacgacaagttcaagggcaaggccaccctgaccgtggacaggagcagcagcaccgcctacatgcagctgaacagcctgacaagcgaggacagcgccgtgtacttctgcaagacctccaccttcttcttcgactactggggccagggaaccaccctgacagtgtccagcaccacgacgccagcgccgcgaccaccaacaccggcgcccaccatcgcgtcgcagcccctgtccctgcgcccagaggcgtgccggccagcggcggggggcgcagtgcacacgagggggctggacttcgcctgtgatatctacatctgggcgcccttggccgggacttgtggggtccttctcctgtcactggttatcaccctttactgcaaacggggcagaaagaaactcctgtatatattcaaacaaccatttatgagaccagtacaaactactcaagaggaagatggctgtagctgccgatttccagaagaagaagaaggaggatgtgaactgagagtgaagttcagcaggagcgcagacgcccccgcgtacaagcagggccagaaccagctctataacgagctcaatctaggacgaagagaggagtacgatgttttggacaagaggcgtggccgggaccctgagatggggggaaagccgagaaggaagaaccctcaggaaggcctgtacaatgaactgcagaaagataagatggcggaggcctacagtgagattgggatgaaaggcgagcgccggaggggcaaggggcacgatggcctttaccagggtctcagtacagccaccaaggacacctacgacgcccttcacatgcaggccctgccccctcgctaa

SEQ ID NO: 69 - DNA, 2982 bp, Artificial Sequence
  Synthesized
atggccttaccagtgaccgccttgctcctgccgctggccttgctgctccacgccgccaggccggacatccagctcacccagtccccgagctcgctgtccgcctccgtgggagatcgggtcaccatcacgtgccgcgccagccagtcgatttcctcctacctgaactggtaccaacagaagcccggaaaagccccgaagcttctcatctacgccgcctcgagcctgcagtcaggagtgccctcacggttctccggctccggttccggtactgatttcaccctgaccatttcctccctgcaaccggaggacttcgctacttactactgccagcagtcgtactccaccccctacactttcggacaaggcaccaaggtcgaaatcaagggtggcggtggctcgggcggtggtgggtcgggtggcggcggatctgaagtgcaattggtggaatcagggggaggacttgtgcagcctggaggatcgctgagactgtcatgtgccgtgtccggctttgccctgtccaaccacgggatgtcctgggtccgccgcgcgcctggaaagggcctcgaatgggtgtcgggtattgtgtacagcggtagcacctactatgccgcatccgtgaaggggagattcaccatcagccgggacaactccaggaacactctgtacctccaaatgaattcgctgaggccagaggacactgccatctactactgctccgcgcatggcggagagtccgacgtctggggacaggggaccaccgtgaccgtgtctagcaccacgacgccagcgccgcgaccaccaacaccggcgcccaccatcgcgtcgcagcccctgtccctgcgcccagaggcgtgccggccagcggcggggggcgcagtgcacacgagggggctggacttcgcctgtgatatctacatctgggcgcccttggccgggacttgtggggtccttctcctgtcactggttatcaccctttactgcaaacggggcagaaagaaactcctgtatatattcaaacaaccatttatgagaccagtacaaactactcaagaggaagatggctgtagctgccgatttccagaagaagaagaaggaggatgtgaactgagagtgaagttcagcaggagcgcagacgcccccgcgtacaagcagggccagaaccagctctataacgagctcaatctaggacgaagagaggagtacgatgttttggacaagaggcgtggccgggaccctgagatggggggaaagccgagaaggaagaaccctcaggaaggcctgtacaatgaactgcagaaagataagatggcggaggcctacagtgagattgggatgaaaggcgagcgccggaggggcaaggggcacgatggcctttaccagggtctcagtacagccaccaaggacacctacgacgcccttcacatgcaggccctgccccctcgctaatctagagccacgaacttctctctgttaaagcaagcaggagacgtggaagaaaaccccggtcctcatatgatggccttaccagtgaccgccttgctcctgccgctggccttgctgctccacgccgccaggccggacatcgtgatgacccagtccccctccagcctgacagtgacagccggcgagaaggtgacaatgatctgtaagtccagccagagcctgctgaacagcggcgaccagaagaactacctgacctggtaccagcagaagcctggccagccccccaagctgctgatcttctgggccagcacaagggagagcggcgtgcccgacagattcacaggcagcggcagcggcaccgacttcacactgaccatttcctccgtgcaggccgaggacctcgccgtgtactactgccagaacgactactcctaccccctgacattcggcgccggcaccaaactggagctgaagggtggcggtggctcgggcggtggtgggtcgggtggcggcggatctcaggtgcagctccagcagtccgatgccgagctggtgaagcccggaagcagcgtcaagatcagctgtaaggcctccggctacaccttcacagaccacgccatccactgggtgaagcagaagcccgagcagggcctggagtggatcggccactttagccccggaaacaccgacatcaagtacaacgacaagttcaagggcaaggccaccctgaccgtggacaggagcagcagcaccgcctacatgcagctgaacagcctgacaagcgaggacagcgccgtgtacttctgcaagacctccaccttcttcttcgactactggggccagggaaccaccctgacagtgtccagcaccacgacgccagcgccgcgaccaccaacaccggcgcccaccatcgcgtcgcagcccctgtccctgcgcccagaggcgtgccggccagcggcggggggcgcagtgcacacgagggggctggacttcgcctgtgatatctacatctgggcgcccttggccgggacttgtggggtccttctcctgtcactggttatcaccctttactgcaaacggggcagaaagaaactcctgtatatattcaaacaaccatttatgagaccagtacaaactactcaagaggaagatggctgtagctgccgatttccagaagaagaagaaggaggatgtgaactgagagtgaagttcagcaggagcgcagacgcccccgcgtacaagcagggccagaaccagctctataacgagctcaatctaggacgaagagaggagtacgatgttttggacaagaggcgtggccgggaccctgagatggggggaaagccgagaaggaagaaccctcaggaaggcctgtacaatgaactgcagaaagataagatggcggaggcctacagtgagattgggatgaaaggcgagcgccggaggggcaaggggcacgatggcctttaccagggtctcagtacagccaccaaggacacctacgacgcccttcacatgcaggccctgccccctcgctaa

SEQ ID NO: 70 - protein, 244 aa, Artificial Sequence
  Synthesized
DIVMTQSPSSLTVTAGEKVTMICKSSQSLLNSGDQKNYLTWYQQKPGQPPKLLIFWASTRESGVPDRFTGSGSGTDFTLTISSVQAEDLAVYYCQNDYSYPLTFGAGTKLELKGGGGSGGGGSGGGGSQVQLQQSDAELVKPGSSVKISCKASGYTFTDHAIHWVKQKPEQGLEWIGHFSPGNTDIKYNDKFKGKATLTVDRSSSTAYMQLNSLTSEDSAVYFCKTSTFFFDYWGQGTTLTVSS

SEQ ID NO: 71 - protein, 116 aa, Artificial Sequence
  Synthesized
QVQLQQSDAELVKPGSSVKISCKASGYTFTDHAIHWVKQKPEQGLEWIGHFSPGNTDIKYNDKFKGKATLTVDRSSSTAYMQLNSLTSEDSAVYFCKTSTFFFDYWGQGTTLTVSS

SEQ ID NO: 72 - protein, 113 aa, Artificial Sequence
  Synthesized
DIVMTQSPSSLTVTAGEKVTMICKSSQSLLNSGDQKNYLTWYQQKPGQPPKLLIFWASTRESGVPDRFTGSGSGTDFTLTISSVQAEDLAVYYCQNDYSYPLTFGAGTKLELK

SEQ ID NO: 73 - protein, 12 aa, Artificial Sequence
  Synthesized
QSLLNSGDQKNY

SEQ ID NO: 74 - protein, 107 aa, Artificial Sequence
  Synthesized
DIQMTQSPSSLSASVGDRVTITCRASQDISKYLNWYQQKPGKAPKLLIYHTSRLHSGVPSRFSGSGSGTDFTLTISSLQPEDFATYYCQQGNTLPYTFGQGTKVEIK

SEQ ID NO: 75 - protein, 9 aa, Artificial Sequence
  Synthesized
QNDYSYPLT

SEQ ID NO: 76 - protein, 8 aa, Artificial Sequence
  Synthesized
GYTFTDHA

SEQ ID NO: 77 - protein, 8 aa, Artificial Sequence
  Synthesized
FSPGNTDI

SEQ ID NO: 78 - protein, 9 aa, Artificial Sequence
  Synthesized
KTSTFFFDY

SEQ ID NO: 79 - protein, 246 aa, Artificial Sequence
  Synthesized
DIVMTQAAFSNPVTLGTSASISCRSSKSLLHSNGITYFFWYLQKPGLSPQLLIYQMSNLASGVPDRFSSSGSGTDFTLRISRVEAEDVGVYYCAQNLELPPTFGGGTKLEIKRAGGGGSGGGGSGGGGSEVKLVESGGGLVQPGGSMKLSCVASGFTFSNYWMNWVRQSPEKGLEWVAEIRLKSNNYTTHYAESVKGRFTISRDDSKSSVSLQMNNLRVEDTGIYYCTRHYYFDYWGQGTTLTVSS

SEQ ID NO: 80 - protein, 117 aa, Artificial Sequence
  Synthesized
EVKLVESGGGLVQPGGSMKLSCVASGFTFSNYWMNWVRQSPEKGLEWVAEIRLKSNNYTTHYAESVKGRFTISRDDSKSSVSLQMNNLRVEDTGIYYCTRHYYFDYWGQGTTLTVSS

SEQ ID NO: 81 - protein, 114 aa, Artificial Sequence
  Synthesized
DIVMTQAAFSNPVTLGTSASISCRSSKSLLHSNGITYFFWYLQKPGLSPQLLIYQMSNLASGVPDRFSSSGSGTDFTLRISRVEAEDVGVYYCAQNLELPPTFGGGTKLEIKRA

SEQ ID NO: 82 - protein, 16 aa, Artificial Sequence
  Synthesized
RSSKSLLHSNGITYFF

SEQ ID NO: 83 - protein, 7 aa, Artificial Sequence
  Synthesized
QMSNLAS

SEQ ID NO: 84 - protein, 9 aa, Artificial Sequence
  Synthesized
AQNLELPPT

SEQ ID NO: 85 - protein, 5 aa, Artificial Sequence
  Synthesized
NYWMN

SEQ ID NO: 86 - protein, 19 aa, Artificial Sequence
  Synthesized
EIRLKSNNYTTHYAESVKG

SEQ ID NO: 87 - protein, 6 aa, Artificial Sequence
  Synthesized
HYYFDY

SEQ ID NO: 88 - protein, 4 aa, Artificial Sequence
  Synthesized
GSTA

SEQ ID NO: 89 - protein, 97 aa, Artificial Sequence
  Synthesized
CSRAARGTIGARRTGQPLKEDPSAVPVFSVDAGELDFQWREKTPEPPVPCVPEQTEAATIVFPSGMGTSSPARRGSADGPRSAQPLRPEDGHCSWPL

SEQ ID NO: 90 - protein, 17 aa, Artificial Sequence
  Synthesized
CSRAARGTIDGHCSWPL

SEQ ID NO: 91 - protein, 21 aa, Artificial Sequence
  Synthesized
VGVVGGLLGSLVLLVWVLAVI

SEQ ID NO: 92 - protein, 18 aa, Artificial Sequence
  Synthesized
GNILNVSIKICLTLSPST

SEQ ID NO: 93 - protein, 9 aa, Artificial Sequence
  Synthesized
CSRAARGTI

SEQ ID NO: 94 - protein, 80 aa, Artificial Sequence
  Synthesized
GARRTGQPLKEDPSAVPVFSVDYGELDFQWREKTPEPPVPCVPEQTEYATIVFPSGMGTSSPARRGSADGPRSAQPLRPE

SEQ ID NO: 95 - protein, 80 aa, Artificial Sequence; identical to SEQ ID NO: 94
  Synthesized

SEQ ID NO: 96 - protein, 196 aa, Artificial Sequence
  Synthesized
QLVKSELEEKKSELRHKLKYVPHEYIELIEIARNSTQDRILEMKVMEFFMKVYGYRGKHLGGSRKPDGAIYTVGSPIDYGVIVDTKAYSGGYNLPIGQADEMQRYVEENQTRNKHINPNEWWKVYPSSVTEFKFLFVSGHFKGNYKAQLTRLNHITNCNGAVLSVEELLIGGEMIKAGTLTLEEVRRKFNNGEINF

SEQ ID NO: 97 - protein, 196 aa, Artificial Sequence
  Synthesized
QLVKSELEEKKSELRHKLKYVPHEYIELIEIARNSTQDRILEMKVMEFFMKVYGYRGKHLGGSRKPDGAIYTVGSPIDYGVIVDTKAYSGGYNLPIGQADEMQRYVKENQTRNKHINPNEWWKVYPSSVTEFKFLFVSGHFKGNYKAQLTRLNHKTNCNGAVLSVEELLIGGEMIKAGTLTLEEVRRKFNNGEINF

SEQ ID NO: 98 - protein, 196 aa, Artificial Sequence
  Synthesized
QLVKSELEEKKSELRHKLKYVPHEYIELIEIARNSTQDRILEMKVMEFFMKVYGYRGKHLGGSRKPDGAIYTVGSPIDYGVIVDTKAYSGGYNLPIGQADEMERYVEENQTRNKHLNPNEWWKVYPSSVTEFKFLFVSGHFKGNYKAQLTRLNHITNCNGAVLSVEELLIGGEMIKAGTLTLEEVRRKFNNGEINF

SEQ ID NO: 99 - protein, 323 aa, Artificial Sequence [sequence omitted]

SEQ ID NO: 100 - protein, 127 aa, Artificial Sequence
  Synthesized
MNVPTQLLGLLLLWLTGGKCDIQMTQSPASLSASLEEIVTITCKASQAIDAYLSWYQQKPGKSPQLLIYDATSLADGVPSRFSGSRSGTQYSLKISRPQVDDSGIYYCLQSYSTPFTFGSGTKLEIK

SEQ ID NO: 101 - protein, 184 aa, Homo sapiens
MAPLLPIRTLPLILILLALLSPGAADFNISSLSGLLSPALTESLLVALPPCHLTGGNATLMVRRANDSKVVTSSFVVPPCRGRRELVSVVDSGAGFTVTRLSAYQVTNLVPGTKFYISYLVKKGTATESSREIPMSTLPRRNMESIGLGMARTGGMVVITVLLSVAMFLLVLGFIIALALGSRK

SEQ ID NO: 102 - protein, 909 aa, Homo sapiens
MAARPLPVSPARALLLALAGALLAPCEARGVSLWNQGRADEVVSASVGSGDLWIPVKSFDSKNHPEVLNIRLQRESKELIINLERNEGLIASSFTETHYLQDGTDVSLARNYTVILGHCYYHGHVRGYSDSAVSLSTCSGLRGLIVFENESYVLEPMKSATNRYKLFPAKKLKSVRGSCGSHHNTPNLAAKNVFPPPSQTWARRHKRETLKATKYVELVIVADNREFQRQGKDLEKVKQRLIEIANHVDKFYRPLNIRIVLVGVEVWNDMDKCSVSQDPFTSLHEFLDWRKMKLLPRKSHDNAQLVSGVYFQGTTIGMAPIMSMCTADQSGGIVMDHSDNPLGAAVTLAHELGHNFGMNHDTLDRGCSCQMAVEKGGCIMNASTGYPFPMVFSSCSRKDLETSLEKGMGVCLFNLPEVRESFGGQKCGNRFVEEGEECDCGEPEECMNRCCNATTCTLKPDAVCAHGLCCEDCQLKPAGTACRDSSNSCDLPEFCTGASPHCPANVYLHDGHSCQDVDGYCYNGICQTHEQQCVTLWGPGAKPAPGICFERVNSAGDPYGNCGKVSKSSFAKCEMRDAKCGKIQCQGGASRPVIGTNAVSIETNIPLQQGGRILCRGTHVYLGDDMPDPGLVLAGTKCADGKICLNRQCQNISVFGVHECAMQCHGRGVCNNRKNCHCEAHWAPPFCDKFGFGGSTDSGPIRQADNQGLTIGILVTILCLLAAGFVVYLKRKTLIRLLFTNKKTTIEKLRCVRPSRPPRGFQPCQAHLGHLGKGLMRKPPDSYPPKDNPRRLLQCQNVDISRPLNGLNVPQPQSTQRVLPPLHRAPRAPSVPARPLPAKPALRQAQGTCKPNPPQKPLPADPLARTTRLTHALARTPGQWETGLRLAPLRPAPQYPHQVPRSTHTAYIK

SEQ ID NO: 103 - protein, 553 aa, Homo sapiens
MVQRLWVSRLLRHRKAQLLLVNLLTFGLEVCLAAGITYVPPLLLEVGVEEKFMTMVLGIGPVLGLVCVPLLGSASDHWRGRYGRRRPFIWALSLGILLSLFLIPRAGWLAGLLCPDPRPLELALLILGVGLLDFCGQVCFTPLEALLSDLFRDPDHCRQAYSVYAFMISLGGCLGYLLPAIDWDTSALAPYLGTQEECLFGLLTLIFLTCVAATLLVAEEAALGPTEPAEGLSAPSLSPHCCPCRARLAFRNLGALLPRLHQLCCRMPRTLRRLFVAELCSWMALMTFTLFYTDFVGEGLYQGVPRAEPGTEARRHYDEGVRMGSLGLFLQCAISLVFSLVMDRLVQRFGTRAVYLASVAAFPVAAGATCLSHSVAVVTASAALTGFTFSALQILPYTLASLYHREKQVFLPKYRGDTGGASSEDSLMTSFLPGPKPGAPFPNGHVGAGGSGLLPPPPALCGASACDVSVRVVVGEPTEARVVPGRGICLDLAILDSAFLLSQVAPSLFMGSIVQLSQSVTAYMVSAAGLGLVAIYFATQVVFDKSDLAKYSA

SEQ ID NO: 104 - protein, 418 aa, Homo sapiens
MRAAPLLLARAASLSLGFLFLLFFWLDRSVLAKELKFVTLVFRHGDRSPIDTFPTDPIKESSWPQGFGQLTQLGMEQHYELGEYIRKRYRKFLNESYKHEQVYIRSTDVDRTLMSAMTNLAALFPPEGVSIWNPILLWQPIPVHTVPLSEDQLLYLPFRNCPRFQELESETLKSEEFQKRLHPYKDFIATLGKLSGLHGQDLFGIWSKVYDPLYCESVHNFTLPSWATEDTMTKLRELSELSLLSLYGIHKQKEKSRLQGGVLVNEILNHMKRATQIPSYKKLIMYSAHDTTVSGLQMALDVYNGLLPPYASCHLTELYFEKGEYFVEMYYRNETQHEPYPLMLPGCSPSCPLERFAELVGPVIPQDWSTECMTTNSHQVLKVIFAVAFCLISAVLMVLLFIHIRRGLCWQRESYGNI

SEQ ID NO: 105 - protein, 560 aa, Homo sapiens
MKMQKGNVLLMFGLLLHLEAATNSNETSTSANTGSSVISSGASTATNSGSSVTSSGVSTATISGSSVTSNGVSIVTNSEFHTTSSGISTATNSEFSTVSSGISIATNSESSTTSSGASTATNSESSTPSSGASTATNSDSSTTSSGASTATNSDSSTTSSEASTATNSESSTTSSGASTATNSESSTVSSRASTATNSESSTTSSGASTATNSESRTTSNGAGTATNSESSTTSSGASTATNSESSTPSSGAGTATNSESSTTSSGAGTATNSESSTVSSGISTVTNSESSTPSSGANTATNSESSTTSSGANTATNSDSSTTSSGASTATNSESSTTSSGASTATNSESSTTSSGASTATNSGSSTTSSGTSTATNSESSTVSSGASTATTSESSTTSSGASTATNSESSTVSSGASTATNSESSTTSSGANTATNSGSSVTSAGSGTAALTGMHTTSHSASTAVSEAKPGGSLVPWEIFLITLVSVVAAVGLFAGLFFCVRNSLSLRNTFNTAVYHPHGLNHGLGPGPGGNHGAPHRPRWSPNWFWRRPVSSIAMEMS

SEQ ID NO: 106 - protein, 14507 aa, Homo sapiens
MLKPSGLPGSSSPTRSLMTGSRSTKATPEMDSGLTGATLSPKTSTGAIVVTEHTLPFTSPDKTLASPTSSVVGRTTQSLGVMSSALPESTSRGMTHSEQRTSPSLSPQVNGTPSRNYPATSMVSGLSSPRTRTSSTEGNFTKEASTYTLTVETTSGPVTEKYTVPTETSTTEGDSTETPWDTRYIPVKITSPMKTFADSTASKENAPVSMTPAETTVTDSHTPGRTNPSFGTLYSSFLDLSPKGTPNSRGETSLELILSTTGYPFSSPEPGSAGHSRISTSAPLSSSASVLDNKISETSIFSGQSLTSPLSPGVPEARASTMPNSAIPFSMTLSNAETSAERVRSTISSLGTPSISTKQTAETILTFHAFAETMDIPSTHIAKTLASEWLGSPGTLGGTSTSALTTTSPSTTLVSEETNTHHSTSGKETEGTLNTSMTPLETSAPGEESEMTATLVPTLGFTTLDSKIRSPSQVSSSHPTRELRTTGSTSGRQSSSTAAHGSSDILRATTSSTSKASSWTSESTAQQFSEPQHTQWVETSPSMKTERPPASTSVAAPITTSVPSVVSGFTTLKTSSTKGIWLEETSADTLIGESTAGPTTHQFAVPTGISMTGGSSTRGSQGTTHLLTRATASSETSADLTLATNGVPVSVSPAVSKTAAGSSPPGGTKPSYTMVSSVIPETSSLQSSAFREGTSLGLTPLNTRHPFSSPEPDSAGHTKISTSIPLLSSASVLEDKVSATSTFSHHKATSSITTGTPEISTKTKPSSAVLSSMTLSNAATSPERVRNATSPLTHPSPSGEETAGSVLTLSTSAETTDSPNIHPTGTLTSESSESPSTLSLPSVSGVKTTFSSSTPSTHLFTSGEETEETSNPSVSQPETSVSRVRTTLASTSVPTPVFPTMDTWPTRSAQFSSSHLVSELRATSSTSVTNSTGSALPKISHLTGTATMSQTNRDTFNDSAAPQSTTWPETSPRFKTGLPSATTTVSTSATSLSATVMVSKFTSPATSSMEATSIREPSTTILTTETTNGPGSMAVASTNIPIGKGYITEGRLDTSHLPIGTTASSETSMDFTMAKESVSMSVSPSQSMDAAGSSTPGRTSQFVDTFSDDVYHLTSREITIPRDGTSSALTPQMTATHPPSPDPGSARSTWLGILSSSPSSPTPKVTMSSTFSTQRVTTSMIMDTVETSRWNMPNLPSTTSLTPSNIPTSGAIGKSTLVPLDTPSPATSLEASEGGLPTLSTYPESTNTPSIHLGAHASSESPSTIKLTMASVVKPGSYTPLTFPSIETHIHVSTARMAYSSGSSPEMTAPGETNTGSTWDPTTYITTTDPKDTSSAQVSTPHSVRTLRTTENHPKTESATPAAYSGSPKISSSPNLTSPATKAWTITDTTEHSTQLHYTKLAEKSSGFETQSAPGPVSVVIPTSPTIGSSTLELTSDVPGEPLVLAPSEQTTITLPMATWLSTSLTEEMASTDLDISSPSSPMSTFAIFPPMSTPSHELSKSEADTSAIRNTDSTTLDQHLGIRSLGRTGDLTTVPITPLTTTWTSVIEHSTQAQDTLSATMSPTHVTQSLKDQTSIPASASPSHLTEVYPELGTQGRSSSEATTFWKPSTDTLSREIETGPTNIQSTPPMDNTTTGSSSSGVTLGIAHLPIGTSSPAETSTNMALERRSSTATVSMAGTMGLLVTSAPGRSISQSLGRVSSVLSESTTEGVTDSSKGSSPRLNTQGNTALSSSLEPSYAEGSQMSTSIPLTSSPTTPDVEFIGGSTFWTKEVTTVMTSDISKSSARTESSSATLMSTALGSTENTGKEKLRTASMDLPSPTPSMEVTPWISLTLSNAPNTTDSLDLSHGVHTSSAGTLATDRSLNTGVTRASRLENGSDTSSKSLSMGNSTHTSMTYTEKSEVSSSIHPRPETSAPGAETTLTSTPGNRAISLTLPFSSIPVEEVISTGITSGPDINSAPMTHSPITPPTIVWTSTGTIEQSTQPLHAVSSEKVSVQTQSTPYVNSVAVSASPTHENSVSSGSSTSSPYSSASLESLDSTISRRNAITSWLWDLTTSLPTTTWPSTSLSEALSSGHSGVSNPSSTTTEFPLFSAASTSAAKQRNPETETHGPQNTAASTLNTDASSVTGLSETPVGASISSEVPLPMAITSRSDVSGLTSESTANPSLGTASSAGTKLTRTISLPTSESLVSFRMNKDPWTVSIPLGSHPTTNTETSIPVNSAGPPGLSTVASDVIDTPSDGAESIPTVSFSPSPDTEVTTISHFPEKTTHSFRTISSLTHELTSRVTPIPGDWMSSAMSTKPTGASPSITLGERRTITSAAPTTSPIVLTASFTETSTVSLDNETTVKTSDILDARKTNELPSDSSSSSDLINTSIASSTMDVTKTASISPTSISGMTASSSPSLFSSDRPQVPTSTTETNTATSPSVSSNTYSLDGGSNVGGTPSTLPPFTITHPVETSSALLAWSRPVRTFSTMVSTDTASGENPTSSNSVVTSVPAPGTWTSVGSTTDLPAMGFLKTSPAGEAHSLLASTIEPATAFTPHLSAAVVTGSSATSEASLLTTSESKAIHSSPQTPTTPTSGANWETSATPESLLVVTETSDTTLTSKILVTDTILFSTVSTPPSKFPSTGTLSGASFPTLLPDTPAIPLTATEPTSSLATSFDSTPLVTIASDSLGTVPETTLTMSETSNGDALVLKTVSNPDRSIPGITIQGVTESPLHPSSTSPSKIVAPRNTTYEGSITVALSTLPAGTTGSLVFSQSSENSETTALVDSSAGLERASVMPLTTGSQGMASSGGIRSGSTHSTGTKTFSSLPLTMNPGEVTAMSEITTNRLTATQSTAPKGIPVKPTSAESGLLTPVSASSSPSKAFASLTTAPPTWGIPQSTLTFEFSEVPSLDTKSASLPTPGQSLNTIPDSDASTASSSLSKSPEKNPRARMMTSTKAISASSFQSTGFTETPEGSASPSMAGHEPRVPTSGTGDPRYASESMSYPDPSKASSAMTSTSLASKLTTLFSTGQAARSGSSSSPISLSTEKETSFLSPTASTSRKTSLFLGPSMARQPNILVHLQTSALTLSPTSTLNMSQEEPPELTSSQTIAEEEGTTAETQTLTFTPSETPTSLLPVSSPTEPTARRKSSPETWASSISVPAKTSLVETTDGTLVTTIKMSSQAAQGNSTWPAPAEETGSSPAGTSPGSPEMSTTLKIMSSKEPSISPEIRSTVRNSPWKTPETTVPMETTVEPVTLQSTALGSGSTSISHLPTGTTSPTKSPTENMLATERVSLSPSPPEAWTNLYSGTPGGTRQSLATMSSVSLESPTARSITGTGQQSSPELVSKTTGMEFSMWHGSTGGTTGDTHVSLSTSSNILEDPVTSPNSVSSLTDKSKHKTETWVSTTAIPSTVLNNKIMAAEQQTSRSVDEAYSSTSSWSDQTSGSDITLGASPDVTNTLYITSTAQTTSLVSLPSGDQGITSLTNPSGGKTSSASSVTSPSIGLETLRANVSAVKSDIAPTAGHLSQTSSPAEVSILDVTTAPTPGISTTITTMGTNSISTTTPNPEVGMSTMDSTPATERRTTSTEHPSTWSSTAASDSWTVTDMTSNLKVARSPGTISTMHTTSFLASSTELDSMSTPHGRITVIGTSLVTPSSDASAVKTETSTSERTLSPSDTTASTPISTFSRVQRMSISVPDILSTSWTPSSTEAEDVPVSMVSTDHASTKTDPNTPLSTFLFDSLSTLDWDTGRSLSSATATTSAPQGATTPQELTLETMISPATSQLPFSIGHITSAVTPAAMARSSGVTFSRPDPTSKKAEQTSTQLPTTTSAHPGQVPRSAATTLDVIPHTAKTPDATFQRQGQTALTTEARATSDSWNEKEKSTPSAPWITEMMNSVSEDTIKEVTSSSSVLRTLNTLDINLESGTTSSPSWKSSPYERIAPSESTTDKEAIHPSTNTVETTGWVTSSEHASHSTIPAHSASSKLTSPVVTTSTREQAIVSMSTTTWPESTRARTEPNSFLTIELRDVSPYMDTSSTTQTSIISSPGSTAITKGPRTEITSSKRISSSFLAQSMRSSDSPSEAITRLSNFPAMTESGGMILAMQTSPPGATSLSAPTLDTSATASWTGTPLATTQRFTYSEKTTLFSKGPEDTSQPSPPSVEETSSSSSLVPIHATTSPSNILLTSQGHSPSSTPPVTSVFLSETSGLGKTTDMSRISLEPGTSLPPNLSSTAGEALSTYEASRDTKAIHHSADTAVTNMEATSSEYSPIPGHTKPSKATSPLVTSHIMGDITSSTSVFGSSETTEIETVSSVNQGLQERSTSQVASSATETSTVITHVSSGDATTHVTKTQATFSSGTSISSPHQFITSTNTFTDVSTNPSTSLIMTESSGVTITTQTGPTGAATQGPYLLDTSTMPYLTETPLAVTPDFMQSEKTTLISKGPKDVSWTSPPSVAETSYPSSLTPFLVTTIPPATSTLQGQHTSSPVSATSVLTSGLVKTTDMLNTSMEPVTNSPQNLNNPSNEILATLAATTDIETIHPSINKAVTNMGTASSAHVLHSTLPVSSEPSTATSPMVPASSMGDALASISIPGSETTDIEGEPTSSLTAGRKENSTLQEMNSTTESNIILSNVSVGAITEATKMEVPSFDATFIPTPAQSTKFPDIFSVASSRLSNSPPMTISTHMTTTQTGSSGATSKIPLALDTSTLETSAGTPSVVTEGFAHSKITTAMNNDVKDVSQTNPPFQDEASSPSSQAPVLVTTLPSSVAFTPQWHSTSSPVSMSSVLTSSLVKTAGKVDTSLETVTSSPQSMSNTLDDISVTSAATTDIETTHPSINTVVTNVGTTGSAFESHSTVSAYPEPSKVTSPNVTTSTMEDTTISRSIPKSSKTTRTETETTSSLTPKLRETSISQEITSSTETSTVPYKELTGATTEVSRTDVTSSSSTSFPGPDQSTVSLDISTETNTRLSTSPIMTESAEITITTQTGPHGATSQDTFTMDPSNTTPQAGIHSAMTHGFSQLDVTTLMSRIPQDVSWTSPPSVDKTSSPSSFLSSPAMTTPSLISSTLPEDKLSSPMTSLLTSGLVKITDILRTRLEPVTSSLPNFSSTSDKILATSKDSKDTKEIFPSINTEETNVKANNSGHESHSPALADSETPKATTQMVITTTVGDPAPSTSMPVHGSSETTNIKREPTYFLTPRLRETSTSQESSFPTDTSFLLSKVPTGTITEVSSTGVNSSSKISTPDHDKSTVPPDTFTGEIPRVFTSSIKTKSAEMTITTQASPPESASHSTLPLDTSTTLSQGGTHSTVTQGFPYSEVTTLMGMGPGNVSWMTTPPVEETSSVSSLMSSPAMTSPSPVSSTSPQSIPSSPLPVTALPTSVLVTTTDVLGTTSPESVTSSPPNLSSITHERPATYKDTAHTEAAMHHSTNTAVTNVGTSGSGHKSQSSVLADSETSKATPLMSTTSTLGDTSVSTSTPNISQTNQIQTEPTASLSPRLRESSTSEKTSSTTETNTAFSYVPTGAITQASRTEISSSRTSISDLDRPTIAPDISTGMITRLFTSPIMTKSAEMTVTTQTTTPGATSQGILPWDTSTTLFQGGTHSTVSQGFPHSEITTLRSRTPGDVSWMTTPPVEETSSGFSLMSPSMTSPSPVSSTSPESIPSSPLPVTALLTSVLVTTTNVLGTTSPEPVTSSPPNLSSPTQERLTTYKDTAHTEAMHASMHTNTAVANVGTSISGHESQSSVPADSHTSKATSPMGITFAMGDTSVSTSTPAFFETRIQTESTSSLIPGLRDTRTSEEINTVTETSTVLSEVPTTTTTEVSRTEVITSSRTTISGPDHSKMSPYISTETITRLSTFPFVTGSTEMAITNQTGPIGTISQATLTLDTSSTASWEGTHSPVTQRFPHSEETTTMSRSTKGVSWQSPPSVEETSSPSSPVPLPAITSHSSLYSAVSGSSPTSALPVTSLLTSGRRKTIDMLDTHSELVTSSLPSASSFSGEILTSEASTNTETIHFSENTAETNMGTTNSMHKLHSSVSIHSQPSGHTPPKVTGSMMEDAIVSTSTPGSPETKNVDRDSTSPLTPELKEDSTALVMNSTTESNTVFSSVSLDAATEVSRAEVTYYDPTFMPASAQSTKSPDISPEASSSHSNSPPLTISTHKTIATQTGPSGVTSLGQLTLDTSTIATSAGTPSARTQDFVDSETTSVMNNDLNDVLKTSPFSAEEANSLSSQAPLLVTTSPSPVTSTLQEHSTSSLVSVTSVPTPTLAKITDMDTNLEPVTRSPQNLRNTLATSEATTDTHTMHPSINTAVANVGTTSSPNEFYFTVSPDSDPYKATSAVVITSTSGDSIVSTSMPRSSAMKKIESETTFSLIFRLRETSTSQKIGSSSDTSTVFDKAFTAATTEVSRTELTSSSRTSIQGTEKPTMSPDTSTRSVTMLSTFAGLTKSEERTIATQTGPHRATSQGTLTWDTSITTSQAGTHSAMTHGFSQLDLSTLTSRVPEYISGTSPPSVEKTSSSSSLLSLPAITSPSPVPTTLPESRPSSPVHLTSLPTSGLVKTTDMLASVASLPPNLGSTSHKIPTTSEDIKDTEKMYPSTNIAVTNVGTTTSEKESYSSVPAYSEPPKVTSPMVTSFNIRDTIVSTSMPGSSEITRIEMESTFSLAHGLKGTSTSQDPIVSTEKSAVLHKLTTGATETSRTEVASSRRTSIPGPDHSTESPDISTEVIPSLPISLGITESSNMTIITRTGPPLGSTSQGTFTLDTPTTSSRAGTHSMATQEFPHSEMTTVMNKDPEILSWTIPPSIEKTSFSSSLMPSPAMTSPPVSSTLPKTIHTTPSPMTSLLTPSLVMTTDTLGTSPEPTTSSPPNLSSTSHEILTTDEDTTAIEAMHPSTSTAATNVETTSSGHGSQSSVLADSEKTKATAPMDTTSTMGHTTVSTSMSVSSETTKIKRESTYSLTPGLRETSISQNASFSTDTSIVLSEVPTGTTAEVSRTEVTSSGRTSIPGPSQSTVLPEISTRTMTRLFASPTMTESAEMTIPTQTGPSGSTSQDTLTLDTSTTKSQAKTHSTLTQRFPHSEMTTLMSRGPGDMSWQSSPSLENPSSLPSLLSLPATTSPPPISSTLPVTISSSPLPVTSLLTSSPVTTTDMLHTSPELVTSSPPKLSHTSDERLTTGKDTTNTEAVHPSTNTAASNVEIPSSGHESPSSALADSETSKATSPMFITSTQEDTTVAISTPHFLETSRIQKESISSLSPKLRETGSSVETSSAIETSAVLSEVSIGATTEISRTEVTSSSRTSISGSAESTMLPEISTTRKIIKFPTSPILAESSEMTIKTQTSPPGSTSESTFTLDTSTTPSLVITHSTMTQRLPHSEITTLVSRGAGDVPRPSSLPVEETSPPSSQLSLSAMISPSPVSSTLPASSHSSSASVTSLLTPGQVKTTEVLDASAEPETSSPPSLSSTSVEILATSEVTTDTEKIHPFSNTAVTKVGTSSSGHESPSSVLPDSETTKATSAMGTISIMGDTSVSTLTPALSNTRKIQSEPASSLTTRLRETSTSEETSLATEANTVLSKVSTGATTEVSRTEAISFSRTSMSGPEQSTMSQDISIGTIPRISASSVLTESAKMTITTQTGPSESTLESTLNLNTATTPSWVETHSIVIQGFPHPEMTTSMGRGPGGVSWPSPPFVKETSPPSSPLSLPAVTSPHPVSTTFLAHIPPSPLPVTSLLTSGPATTTDILGTSTEPGTSSSSSLSTTSHERLTTYKDTAHTEAVHPSTNTGGTNVATTSSGYKSQSSVLADSSPMCTTSTMGDTSVLTSTPAFLETRRIQTELASSLTPGLRESSGSEGTSSGTKMSTVLSKVPTGATTEISKEDVTSIPGPAQSTISPDISTRTVSWFSTSPVMTESAEITMNTHTSPLGATTQGTSTLDTSSTTSLTMTHSTISQGFSHSQMSTLMRRGPEDVSWMSPPLLEKTRPSFSLMSSPATTSPSPVSSTLPESISSSPLPVTSLLTSGLAKTTDMLHKSSEPVTNSPANLSSTSVEILATSEVTTDTEKTHPSSNRTVTDVGTSSSGHESTSFVLADSQTSKVTSPMVITSTMEDTSVSTSTPGFFETSRIQTEPTSSLTLGLRKTSSSEGTSLATEMSTVLSGVPTGATAEVSRTEVTSSSRTSISGFAQLTVSPETSTETITRLPTSSIMTESAEMMIKTQTDPPGSTPESTHTVDISTTPNWVETHSTVTQRFSHSEMTTLVSRSPGDMLWPSQSSVEETSSASSLLSLPATTSPSPVSSTLVEDFPSASLPVTSLLNPGLVITTDRMGISREPGTSSTSNLSSTSHERLTTLEDTVDTEDMQPSTHTAVTNVRTSISGHESQSSVLSDSETPKATSPMGTTYTMGETSVSISTSDFFETSRIQIEPTSSLTSGLRETSSSERISSATEGSTVLSEVPSGATTEVSRTEVISSRGTSMSGPDQFTISPDISTEAITRLSTSPIMTESAESAITIETGSPGATSEGTLTLDTSTTTFWSGTHSTASPGFSHSEMTTLMSRTPGDVPWPSLPSVEEASSVSSSLSSPAMTSTSFFSTLPESISSSPHPVTALLTLGPVKTTDMLRTSSEPETSSPPNLSSTSAEILATSEVTKDREKIHPSSNTPVVNVGTVIYKHLSPSSVLADLVTTKPTSPMATTSTLGNTSVSTSTPAFPETMMTQPTSSLTSGLREISTSQETSSATERSASLSGMPTGATTKVSRTEALSLGRTSTPGPAQSTISPEISTETITRISTPLTTTGSAEMTITPKTGHSGASSQGTFTLDTSSRASWPGTHSAATHRSPHSGMTTPMSRGPEDVSWPSRPSVEKTSPPSSLVSLSAVTSPSPLYSTPSESSHSSPLRVTSLFTPVMMKTTDMLDTSLEPVTTSPPSMNITSDESLATSKATMETEAIQLSENTAVTQMGTISARQEFYSSYPGLPEPSKVTSPVVTSSTIKDIVSTTIPASSEITRIEMESTSTLTPTPRETSTSQEIHSATKPSTVPYKALTSATIEDSMTQVMSSSRGPSPDQSTMSQDISTEVITRLSTSPIKTESTEMTITTQTGSPGATSRGTLTLDTSTTFMSGTHSTASQGFSHSQMTALMSRTPGDVPWLSHPSVEEASSASFSLSSPVMTSSSPVSSTLPDSIHSSSLPVTSLLTSGLVKTTELLGTSSEPETSSPPNLSSTSAEILAITEVTTDTEKLEMTNVVTSGYTHESPSSVLADSVTTKATSSMGITYPTGDTNVLTSTPAFSDTSRIQTKSKLSLTPGLMETSISEETSSATEKSTVLSSVPTGATTEVSRTEAISSSRTSIPGPAQSTMSSDTSMETITRISTPLTRKESTDMAITPKTGPSGATSQGTFTLDSSSTASWPGTHSATTQRFPQSVVTTPMSRGPEDVSWPSPLSVEKNSPPSSLVSSSSVTSPSPLYSTPSGSSHSSPVPVTSLFTSIMMKATDMLDASLEPETTSAPNMNITSDESLAASKATTETEAIHVFENTAASHVETTSATEELYSSSPGFSEPTKVISPVVTSSSIRDNMVSTTMPGSSGITRIEIESMSSLTPGLRETRTSQDITSSTETSTVLYKMPSGATPEVSRTEVMPSSRTSIPGPAQSTMSLDISDEVVTRLSTSPIMTESAEITITTQTGYSLATSQVTLPLGTSMTFLSGTHSTMSQGLSHSEMTNLMSRGPESLSWTSPRFVETTRSSSSLTSLPLTTSLSPVSSTLLDSSPSSPLPVTSLILPGLVKTTEVLDTSSEPKTSSSPNLSSTSVEIPATSEIMTDTEKIHPSSNTAVAKVRTSSSVHESHSSVLADSETTITIPSMGITSAVDDTTVFTSNPAFSETRRIPTEPTFSLTPGFRETSTSEETTSITETSAVLYGVPTSATTEVSMTEIMSSNRIHIPDSDQSTMSPDIITEVITRLSSSSMMSESTQMTITTQKSSPGATAQSTLTLATTTAPLARTHSTVPPRFLHSEMTTLMSRSPENPSWKSSLFVEKTSSSSSLLSLPVTTSPSVSSTLPQSIPSSSFSVTSLLTPGMVKTTDTSTEPGTSLSPNLSGTSVEILAASEVTTDTEKIHPSSSMAVTNVGTTSSGHELYSSVSIHSEPSKATYPVGTPSSMAETSISTSMPANFETTGFEAEPFSHLTSGFRKTNMSLDTSSVTPTNTPSSPGSTHLLQSSKTDFTSSAKTSSPDWPPASQYTEIPVDIITPFNASPSITESTGITSFPESRFTMSVTESTHHLSTDLLPSAETISTGTVMPSLSEAMTSFATTGVPRAISGSGSPFSRTESGPGDATLSTIAESLPSSTPVPFSSSTFTTTDSSTIPALHEITSSSATPYRVDTSLGTESSTTEGRLVMVSTLDTSSQPGRTSSSPILDTRMTESVELGTVTSAYQVPSLSTRLTRTDGIMEHITKIPNEAAHRGTIRPVKGPQTSTSPASPKGLHTGGTKRMETTTTALKTTTTALKTTSRATLTTSVYTPTLGTLTPLNASMQMASTIPTEMMITTPYVFPDVPETTSSLATSLGAETSTALPRTTPSVFNRESETTASLVSRSGAERSPVIQTLDVSSSEPDTTASWVIHPAETIPTVSKTTPNFFHSELDTVSSTATSHGADVSSAIPTNISPSELDALTPLVTISGTDTSTTFPTLTKSPHETETRTTWLTHPAETSSTIPRTIPNFSHHESDATPSIATSPGAETSSAIPIMTVSPGAEDLVTSQVTSSGTDRNMTIPTLTLSPGEPKTIASLVTHPEAQTSSAIPTSTISPAVSRLVTSMVTSLAAKTSTTNRALTNSPGEPATTVSLVTHPAQTSPTVPWTTSIFFHSKSDTTPSMTTSHGAESSSAVPTPTVSTEVPGVVTPLVTSSRAVISTTIPILTLSPGEPETTPSMATSHGEEASSAIPTPTVSPGVPGVVTSLVTSSRAVTSTTIPILTFSLGEPETTPSMATSHGTEAGSAVPTVLPEVPGMVTSLVASSRAVTSTTLPTLTLSPGEPETTPSMATSHGAEASSTVPTVSPEVPGVVTSLVTSSSGVNSTSIPTLILSPGELETTPSMATSHGAEASSAVPTPTVSPGVSGVVTPLVTSSRAVTSTTIPILTLSSSEPETTPSMATSHGVEASSAVLTVSPEVPGMVTSLVTSSRAVTSTTIPTLTISSDEPETTTSLVTHSEAKMISAIPTLAVSPTVQGLVTSLVTSSGSETSAFSNLTVASSQPETIDSWVAHPGTEASSVVPTLTVSTGEPFTNISLVTHPAESSSTLPRTTSRFSHSELDTMPSTVTSPEAESSSAISTTISPGIPGVLTSLVTSSGRDISATFPTVPESPHESEATASWVTHPAVTSTTVPRTTPNYSHSEPDTTPSIATSPGAEATSDFPTITVSPDVPDMVTSQVTSSGTDTSITIPTLTLSSGEPETTTSFITYSETHTSSAIPTLPVSPGASKMLTSLVISSGTDSTTTFPTLTETPYEPETTAIQLIHPAETNTMVPRTTPKFSHSKSDTTLPVAITSPGPEASSAVSTTTISPDMSDLVTSLVPSSGTDTSTTFPTLSETPYEPETTATWLTHPAETSTTVSGTIPNFSHRGSDTAPSMVTSPGVDTRSGVPTTTIPPSIPGVVTSQVTSSATDTSTAIPTLTPSPGEPETTASSATHPGTQTGFTVPIRTVPSSEPDTMASWVTHPPQTSTPVSRTTSSFSHSSPDATPVMATSPRTEASSAVLTTISPGAPEMVTSQITSSGAATSTTVPTLTHSPGMPETTALLSTHPRTETSKTFPASTVFPQVSETTASLTIRPGAETSTALPTQTTSSLFTLLVTGTSRVDLSPTASPGVSAKTAPLSTHPGTETSTMIPTSTLSLGLLETTGLLATSSSAETSTSTLTLTVSPAVSGLSSASITTDKPQTVTSWNTETSPSVTSVGPPEFSRTVTGTTMTLIPSEMPTPPKTSHGEGVSPTTILRTTMVEATNLATTGSSPTVAKTTTTFNTLAGSLFTPLTTPGMSTLASESVTSRTSYNHRSWISTTSSYNRRYWTPATSTPVTSTFSPGISTSSIPSSTAATVPFMVPFTLNFTITNLQYEEDMRHPGSRKFNATERELQGLLKPLFRNSSLEYLYSGCRLASLRPEKDSSATAVDAICTHRPDPEDLGLDRERLYWELSNLTNGIQELGPYTLDRNSLYVNGFTHRSSMPTTSTPGTSTVDVGTSGTPSSSPSPTTAGPLLMPFTLNFTITNLQYEEDMRRTGSRKFNTMESVLQGLLKPLFKNTSVGPLYSGCRLTLLRPEKDGAATGVDAICTHRLDPKSPGLNREQLYWELSKLTNDIEELGPYTLDRNSLYVNGFTHQSSVSTTSTPGTSTVDLRTSGTPSSLSSPTIMAAGPLLVPFTLNFTITNLQYGEDMGHPGSRKFNTTERVLQGLLGPIFKNTSVGPLYSGCRLTSLRSEKDGAATGVDAICIHHLDPKSPGLNRERLYWELSQLTNGIKELGPYTLDRNSLYVNGFTHRTSVPTSSTPGTSTVDLGTSGTPFSLPSPATAGPLLVLFTLNFTITNLKYEEDMHRPGSRKFNTTERVLQTLLGPMFKNTSVGLLYSGCRLTLLRSEKDGAATGVDAICTHRLDPKSPGVDREQLYWELSQLTNGIKELGPYTLDRNSLYVNGFTHWIPVPTSSTPGTSTVDLGSGTPSSLPSPTTAGPLLVPFTLNFTITNLKYEEDMHCPGSRKFNTTERVLQSLLGPMFKNTSVGPLYSGCRLTLLRSEKDGAATGVDAICTHRLDPKSPGVDREQLYWELSQLTNGIKELGPYTLDRNSLYVNGFTHQTSAPNTSTPGTSTVDLGTSGTPSSLPSPTSAGPLLVPFTLNFTITNLQYEEDMHHPGSRKFNTTERVLQGLLGPMFKNTSVGLLYSGCRLTLLRPEKNGAATGMDAICSHRLDPKSPGLNREQLYWELSQLTHGIKELGPYTLDRNSLYVNGFTHRSSVAPTSTPGTSTVDLGTSGTPSSLPSPTTAVPLLVPFTLNFTITNLQYGEDMRHPGSRKFNTTERVLQGLLGPLFKNSSVGPLYSGCRLISLRSEKDGAATGVDAICTHHLNPQSPGLDREQLYWQLSQMTNGIKELGPYTLDRNSLYVNGFTHRSSGLTTSTPWTSTVDLGTSGTPSPVPSPTTTGPLLVPFTLNFTITNLQYEENMGHPGSRKFNITESVLQGLLKPLFKSTSVGPLYSGCRLTLLRPEKDGVATRVDAICTHRPDPKIPGLDRQQLYWELSQLTHSITELGPYTLDRDSLYVNGFTQRSSVPTTSTPGTFTVQPETSETPSSLPGPTATGPVLLPFTLNFTITNLQYEEDMRRPGSRKFNTTERVLQGLLMPLFKNTSVSSLYSGCRLTLLRPEKDGAATRVDAVCTHRPDPKSPGLDRERLYWKLSQLTHGITELGPYTLDRHSLYVNGFTHQSSMTTTRTPDTSTMHLATSRTPASLSGPMTASPLLVLFTINFTITNLRYEENMHHPGSRKFNTTERVLQGLLRPVFKNTSVGPLYSGCRLTLLRPKKDGAATKVDAICTYRPDPKSPGLDREQLYWELSQLTHSITELGPYTLDRDSLYVNGFTQRSSVPTTSIPGTPTVDLGTSGTPVSKPGPSAASPLLVLFTLNFTITNLRYEENMQHPGSRKFNTTERVLQGLLRSLFKSTSVGPLYSGCRLTLLRPEKDGTATGVDAICTHHPDPKSPRLDREQLYWELSQLTHNITELGPYALDNDSLFVNGFTHRSSVSTTSTPGTPTVYLGASKTPASIFGPSAASHLLILFTLNFTITNLRYEENMWPGSRKFNTTERVLQGLLRPLFKNTSVGPLYSGCRLTLLRPEKDGEATGVDAICTHRPDPTGPGLDREQLYLELSQLTHSITELGPYTLDRDSLYVNGFTHRSSVPTTSTGVVSEEPFTLNFTINNLRYMADMGQPGSLKFNITDNVMQHLLSPLFQRSSLGARYTGCRVIALRSVKNGAETRVDLLCTYLQPLSGPGLPIKQVFHELSQQTHGITRLGPYSLDKDSLYLNGYNEPGPDEPPTTPKPATTFLPPLSEATTAMGYHLKTLTLNFTISNLQYSPDMGKGSATFNSTEGVLQHLLRPLFQKSSMGPFYLGCQLISLRPEKDGAATGVDTTCTYHPDPVGPGLDIQQLYWELSQLTHGVTQLGFYVLDRDSLFINGYAPQNLSIRGEYQINFHIVNWNLSNPDPTSSEYITLLRDIQDKVTTLYKGSQLHDTFRFCLVTNLTMDSVLVTVKALFSSNLDPSLVEQVFLDKTLNASFHWLGSTYQLVDIHVTEMESSVYQPTSSSSTQHFYLNFTITNLPYSQDKAQPGTTNYQRNKRNIEDALNQLFRNSSIKSYFSDCQVSTFRSVPNRHHTGVDSLCNFSPLARRVDRVAIYEEFLRMTRNGTQLQNFTLDRSSVLVDGYSPNRNEPLTGNSDLPFWAVILIGLAGLLGVITCLICGVLVTTRRRKKEGEYNVQQQCPGYYQSHLDLEDLQ

SEQ ID NO: 107 - protein, 267 aa, Homo sapiens
MMSSKPTSHAEVNETIPNPYPPSSFMAPGFQQPLGSINLENQAQGAQRAQPYGITSPGIFASSQPGQGNIQMINPSVGTAVMNFKEEAKALGVIQIMVGLMHIGFGIVLCLISFSFREVLGFASTAVIGGYPFWGGLSFIISGSLSVSASKELSRCLVKGSLGMNIVSSILAFIGVILLLVDMCINGVAGQDYWAVLSGKGISATLMIFSLLEFFVACATAHFANQANTTTNMSVLVIPNMYESNPVTPASSSAPPRCNNYSANAPK

SEQ ID NO: 108 - protein, 535 aa, Homo sapiens
MLGPCMLLLLLLLGLRLQLSLGIIPVEEENPDFWNREAAEALGAAKKLQPAQTAAKNLIIFLGDGMGVSTVTAARILKGQKKDKLGPEIPLAMDRFPYVALSKTYNVDKHVPDSGATATAYLCGVKGNFQTIGLSAAARFNQCNTTRGNEVISVMNRAKKAGKSVGVVTTTRVQHASPAGTYAHTVNRNWYSDADVPASARQEGCQDIATQLISNMDIDVILGGGRKYMFRMGTPDPEYPDDYSQGGTRLDGKNLVQEWLAKRQGARYVWNRTELMQASLDPSVTHLMGLFEPGDMKYEIHRDSTLDPSLMEMTEAALRLLSRNPRGFFLFVEGGRIDHGHHESRAYRALTETIMFDDAIERAGQLTSEEDTLSLVTADHSHVFSFGGYPLRGSSIFGLAPGKARDRKAYTVLLYGNGPGYVLKDGARPDVTESESGSPEYRQQSAVPLDEETHAGEDVAVFARGPQAHLVHGVQEQTFIAHVMAFAACLEPYTACDLAPPAGTTDAAHPGRSVVPALLPLLAGTLLLLETATAP

SEQ ID NO: 109 - protein, 520 aa, Homo sapiens
MEFHNGGHVSGIGGFLVSLTSRMKPHTLAVTPALIFAITVATIGSFQFGYNTGVINAPETIIKEFINKTLTDKANAPPSEVLLTNLWSLSVAIFSVGGMIGSFSVGLFVNRFGRRNSMLIVNLLAATGGCLMGLCKIAESVEMLILGRLVIGLFCGLCTGFVPMYIGEISPTALRGAFGTLNQLGIVIGILVAQIFGLELILGSEELWPVLLGFTILPAILQSAALPCCPESPRFLLINRKKEENATRILQRLWGTQDVSQDIQEMKDESARMSQEKQVTVLELFRVSSYRQPIIISIVLQLSQQLSGINAVFYYSTGIFKDAGVQQPIYATISAGVVNTIFTLLSLFLVERAGRRTLHMIGLGGMAFCSTLMTVSLLLKNHYNGMSFVCIGAILVFVACFEIGPGPIPWFIVAELFSQGPRPAAMAVAGCSNWTSNFLVGLLFPSAAYYLGAYVFIIFTGFLITFLAFTFFKVPETRGRTFEDITRAFEGQAHGADRSGKDGVMGMNSIEPAKETTTNV

SEQ ID NO: 110 - protein, 221 aa, Homo sapiens
MLTLEDKDMKGFSWAIVPALTSLGYLIILVVSIFPFWVRLTNEESHEVFFSGLFENCFNAKCWKPRPLSIYIILGRVFLLSAVFLAFVTTFIMMPFASEFFPRTWKQNFVLACISFFTGACAFLALVLHALEIKALRMKLGPLQFSVLWPYYVLGFGIFLFIVAGTICLIQEMVCPCWHLLSTSQSMEEDHGSLYLDNLESLGGEPSSVQKETQVTAETVI

SEQ ID NO: 111 - protein, 538 aa, Homo sapiens
MGLLLLVLILTPSLAAYRHPDFPLLEKAQQLLQSTGSPYSTNCWLCTSSSTETPGTAYPASPREWTSIEAELHISYRWDPNLKGLMRPANSLLSTVKQDFPDIRQKPPIFGPIFTNINLMGIAPICVMAKRKNGTNVGTLPSTVCNVTFTVDSNQQTYQTYTHNQFRHQPRFPKPPNITFPQGTLLDKSSRFCQGRPSSCSTRNFWFRPADYNQCLQISNLSSTAEWVLLDQTRNSLFWENKTKGANQSQTPCVQVLAGMTIATSYLGISAVSEFFGTSLTPLFHFHISTCLKTQGAFYICGQSIHQCLPSNWTGTCTIGYVTPDIFIAPGNLSLPIPIYGNSPLPRVRRAIHFIPLLAGLGILAGTGTGIAGITKASLTYSQLSKEIANNIDTMAKALTTMQEQIDSLAAVVLQNRRGLDMLTAAQGGICLALDEKCCFWVNQSGKVQDNIRQLLNQASSLRERATQGWLNWEGTWKWFSWVLPLTGPLVSLLLLLLFGPCLLNLITQFVSSRLQAIKLQTNLSAGRHPRNIQESPF

SEQ ID NO: 112 - protein, 1017 aa, Homo sapiens
MVFSVRQCGHVGRTEEVLLTFKIFLVIICLHVVLVTSLEEDTDNSSLSPPPAKLSVVSFAPSSNGTPEVETTSLNDVTLSLLPSNETEKTKITIVKTFNASGVKPQRNICNLSSICNDSAFFRGEIMFQYDKESTVPQNQHITNGTLTGVLSLSELKRSELNKTLQTLSETYFIMCATAEAQSTLNCTFTIKLNNTMNACAVIAALERVKIRPMEHCCCSVRIPCPSSPEELEKLQCDLQDPIVCLADHPRGPPFSSSQSIPVVPRATVLSQVPKATSFAEPPDYSPVTHNVPSPIGEIQPLSPQPSAPIASSPAIDMPPQSETISSPMPQTHVSGTPPPVKASFSSPTVSAPANVNTTSAPPVQTDIVNTSSISDLENQVLQMEKALSLGSLEPNLAGEMINQVSRLLHSPPDMLAPLAQRLLKVVDDIGLQLNFSNTTISLTSPSLALAVIRVNASSFNTTTFVAQDPANLQVSLETQAPENSIGTITLPSSLMNNLPAHDMELASRVQFNFFETPALFQDPSLENLSLISYVISSSVANLTVRNLTRNVTVTLKHINPSQDELTVRCVFWDLGRNGGRGGWSDNGCSVKDRRLNETICTCSHLTSFGVLLDLSRTSVLPAQMMALTFITYIGCGLSSIFLSVTLVTYIAFEKIRRDYPSKILIQLCAALLLLNLVFLLDSWIALYKMQGLCISVAVFLHYFLLVSFTWMGLEAFHMYLALVKVFNTYIRKYILKFCIVGWGVPAVVVTIILTISPDNYGLGSYGKFPNGSPDDFCWINNNAVFYITVVGYFCVIFLLNVSMFIVVLVQLCRIKKKKQLGAQRKTSIQDLRSIAGLTFLLGITWGFAFFAWGPVNVTFMYLFAIFNTLQGFFIFIFYCVAKENVRKQWRRYLCCGKLRLAENSDWSKTATNGLKKQTVNQGVSSSSNSLQSSSNSTNSTTLLVNNDCSVHASGNGNASTERNGVSFSVQNGDVCLHDFTGKQHMFNEKEDSCNGKGRMALRRTSKRGSLHFIEQM

SEQ ID NO: 113 - protein, 775 aa, Homo sapiens
MEPPYSLTAHYDEFQEVKYVSRCGAGGARGASLPPGFPLGAARSATGARSGLPRWNRREVCLLSGLVFAAGLCAILAAMLALKYLGPVAAGGGACPEGCPERKAFARAARFLAANLDASIDPCQDFYSFACGGWLRRHAIPDDKLTYGTIAAIGEQNEERLRRLLARPGGGPGGAAQRKVRAFFRSCLDMREIERLGPRPMLEVIEDCGGWDLGGAEERPGVAARWDLNRLLYKAQGVYSAAALFSLTVSLDDRNSSRYVIRIDQDGLTLPERTLYLAQDEDSEKILAAYRVFMERVLSLLGADAVEQKAQEILQVEQQLANITVSEHDDLRRDVSSMYNKVTLGQLQKITPHLRWKWLLDQIFQEDFSEEEEVVLLATDYMQQVSQLIRSTPHRVLHNYLVWRVVVVLSEHLSPPFREALHELAQEMEGSDKPQELARVCLGQANRHFGMALGALFVHEHFSAASKAKVQQLVEDIKYILGQRLEELDWMDAETRAAARAKLQYMMVMVGYPDFLLKPDAVDKEYEFEVHEKTYFKNILNSIRFSIQLSVKKIRQEVDKSTWLLPPQALNAYYLPNKNQMVFPAGILQPTLYDPDFPQSLNYGGIGTIIGHELTHGYDDWGGQYDRSGNLLHWWTEASYSRFLRKAECIVRLYDNFTVYNQRVNGKHTLGENIADMGGLKLAYHAYQKWVREHGPEHPLPRLKYTHDQLFFIAFAQNWCIKRRSQSIYLQVLTDKHAPEHYRVLGSVSQFEEFGRAFHCPKDSPMNPAHKCSVW

SEQ ID NO: 114 - protein, 529 aa, Homo sapiens
MGPSCPVFLSFTKLSLWWLLLTPAGGEEAKRPPPRAPGDPLSSPSPTALPQGGSHTETEDRLFKHLFRGYNRWARPVPNTSDVVIVRFGLSIAQLIDVDEKNQMMTTNVWLKQEWSDYKLRWNPTDFGNITSLRVPSEMIWIPDIVLYNNADGEFAVTHMTKAHLFSTGTVHWVPPAIYKSSCSIDVTFFPFDQQNCKMKFGSWTYDKAKIDLEQMEQTVDLKDYWESGEWAIVNATGTYNSKKYDCCAEIYPDVTYAFVIRRLPLFYTINLIIPCLLISCLTVLVFYLPSDCGEKITLCISVLLSLTVFLLLITEIIPSTSLVIPLIGEYLLFTMIFVTLSIVITVFVLNVHHRSPSTHTMPHWVRGALLGCVPRWLLMNRPPPPVELCHPLRLKLSPSYHWLESNVDAEEREVVVEEEDRWACAGHVAPSVGTLCSHGHLHSGASGPKAEALLQEGELLLSPHMQKALEGVHYIADHLRSEDADSSVKEDWKYVAMVIDRIFLWLFIIVCFLGTIGLFLPPFLAGMI

SEQ ID NO: 115 - protein, 537 aa, Homo sapiens
MPHLMERMVGSGLLWLALVSCILTQASAVQRGYGNPIEASSYGLDLDCGAPGTPEAHVCFDPCQNYTLLDEPFRSTENSAGSQGCDKNMSGWYRFVGEGGVRMSETCVQVHRCQTDAPMWLNGTHPALGDGITNHTACAHWSGNCCFWKTEVLVKACPGGYHVYRLEGTPWCNLRYCTVPRDPSTVEDKCEKACRPEEECLALNSTWGCFCRQDLNSSDVHSLQPQLDCGPREIKVKVDKCLLGGLGLGEEVIAYLRDPNCSSILQTEERNWVSVTSPVQASACRNILERNQTHAIYKNTLSLVNDFIIRDTILNINFQCAYPLDMKVSLQAALQPIVSSLNVSVDGNGEFIVRMALFQDQNYTNPYEGDAVELSVESVLYVGAILEQGDTSRFNLVLRNCYATPTEDKADLVKYFIIRNSCSNQRDSTIHVEENGQSSESRFSVQMFMFAGHYDLVFLHCEIHLCDSLNEQCQPSCSRSQVRSEVPAIDLARVLDLGPITRRGAQSPGVMNGTPSTAGFLVAWPMVLLTVLLAWLF

SEQ ID NO: 116 - protein, 426 aa, Homo sapiens
MGPLPAPSCTQRITWKGLLLTASLLNFWNPPTTAEVTIEAQPPKVSEGKDVLLLVHNLPQNLPGYFWYKGEMTDLYHYIISYIVDGKIIIYGPAYSGRETVYSNASLLIQNVTRKDAGTYTLHIIKRGDETREEIRHFTFTLYLETPKPYISSSNLNPREAMEAVRLICDPETLDASYLWWMNGQSLPVTHRLQLSKTNRTLYLFGVTKYIAGPYECEIRNPVSASRSDPVTLNLLPKLPIPYITINNLNPRENKDVLAFTCEPKSENYTYIWWLNGQSLPVSPGVKRPIENRILILPSVTRNETGPYQCEIRDRYGGLRSNPVILNVLYGPDLPRIYPSFTYYRSGENLDLSCFTESNPPAEYFWTINGKFQQSGQKLFIPQITRNHSGLYACSVHNSATGKEISKSMTVKVSGPCHGDLTESQS

SEQ ID NO: 117 - protein, 328 aa, Homo sapiens
MEKSIWLLACLAWVLPTGSFVRTKIDTTENLLNTEVHSSPAQRWSMQVPPEVSAEAGDAAVLPCTFTHPHRHYDGPLTAIWRAGEPYAGPQVFRCAAARGSELCQTALSLHGRFRLLGNPRRNDLSLRVERLALADDRRYFCRVEFAGDVHDRYESRHGVRLHVTAAPRIVNISVLPSPAHAFRALCTAEGEPPPALAWSGPALGNSLAAVRSPREGHGHLVTAELPALTHDGRYTCTAANSLGRSEASVYLFRFHGASGASTVALLLGALGFKALLLLGVLAARAARRRPEHLDTPDTPPRSQAQESNYENLSQMNPRSPPATMCSP

SEQ ID NO: 118 - protein, 620 aa, Homo sapiens
MSKSKCSVGLMSSVVAPAKEPNAVGPKEVELILVKEQNGVQLTSSTLTNPRQSPVEAQDRETWGKKIDFLLSVIGFAVDLANVWRFPYLCYKNGGGAFLVPYLLFMVIAGMPLFYMELALGQFNREGAAGVWKICPILKGVGFTVILISLYVGFFYNVIIAWALHYLFSSFTTELPWIHCNNSWNSPNCSDAHPGDSSGDSSGLNDTFGTTPAAEYFERGVLHLHQSHGIDDLGPPRWQLTACLVLVIVLLYFSLWKGVKTSGKVVWITATMPYVVLTALLLRGVTLPGAIDGIRAYLSVDFYRLCEASVWIDAATQVCFSLGVGFGVLIAFSSYNKFTNNCYRDAIVTTSINSLTSFSSGFVVFSFLGYMAQKHSVPIGDVAKDGPGLIFIIYPEAIATLPLSSAWAVVFFIMLLTLGIDSAMGGMESVITGLIDEFQLLHRHRELFTLFIVLATFLLSLFCVTNGGIYVFTLLDHFAAGTSILFGVLIEAIGVAWFYGVGQFSDDIQQMTGQRPSLYWRLCWKLVSPCFLLFVVVVSIVTFRPPHYGAYIFPDWANALGWVIATSSMAMVPIYAAYKFCSLPGSFREKLAYAIAPEKDRELVDRGEVRQFTLRHWLKV

SEQ ID NO: 119 - protein, 398 aa, Homo sapiens
MHTVATSGPNASWGAPANASGCPGCGANASDGPVPSPRAVDAWLVPLFFAALMLLGLVGNSLVIYVICRHKPMRTVTNFYIANLAATDVTFLLCCVPFTALLYPLPGWVLGDFMCKFVNYIQQVSVQATCATLTAMSVDRWYVTVFPLRALHRRTPRLALAVSLSIWVGSAAVSAPVLALHRLSPGPRAYCSEAFPSRALERAFALYNLLALYLLPLLATCACYAAMLRHLGRVAVRPAPADSALQGQVLAERAGAVRAKVSRLVAAVVLLFAACWGPIQLFLVLQALGPAGSWHPRSYAAYALKTWAHCMSYSNSALNPLLYAFLGSHFRQAFRRVCPCAPRRPRRPRRPGPSDPAAPHAELLRLGSHPAPARAQKPGSSGLAARGLCVLGEDNAPL

SEQ ID NO: 120 - protein, 431 aa, Homo sapiens
MQALNITPEQFSRLLRDHNLTREQFIALYRLRPLVYTPELPGRAKLALVLTGVLIFALALFGNALVFYVVTRSKAMRTVTNIFICSLALSDLLITFFCIPVTMLQNISDNWLGGAFICKMVPFVQSTAVVTEILTMTCIAVERHQGLVHPFKMKWQYTNRRAFTMLGVVWLVAVIVGSPMWHVQQLEIKYDFLYEKEHICCLEEWTSPVHQKIYTTFILVILFLLPLMVMLILYSKIGYELWIKKRVGDGSVLRTIHGKEMSKIARKKKRAVIMMVTVVALFAVCWAPFHVVHMMIEYSNFEKEYDDVTIKMIFAIVQIIGFSNSICNPIVYAFMNENFKKNVLSAVCYCIVNKTFSPAQRHGNSGITMMRKKAKFSLRENPVEETKGEAFSDGNIEVKLCEQTEEKKKLKRHLALFRSELAENSPLDSGH

SEQ ID NO: 121 - protein, 335 aa, Homo sapiens
MESSFSFGVILAVLASLIIATNTLVAVAVLLLIHKNDGVSLCFTLNLAVADTLIGVAISGLLTDQLSSPSRPTQKTLCSLRMAFVTSSAAASVLTVMLITFDRYLAIKQPFRYLKIMSGFVAGACIAGLWLVSYLIGFLPLGIPMFQQTAYKGQCSFFAVFHPHFVLTLSCVGFFPAMLLFVFFYCDMLKIASMHSQQIRKMEHAGAMAGGYRSPRTPSDFKALRTVSVLIGSFALSWTPFLITGIVQVACQECHLYLVLERYLWLLGVGNSLLNPLIYAYWQKEVRLQLYHMALGVKKVLTSFLLFLSARNCGPERPRESSCHIVTISSSEFDG

SEQ ID NO: 122 - protein, 220 aa, Homo sapiens
MASAGMQILGVVLTLLGWVNGLVSCALPMWKVTAFIGNSIVVAQVVWEGLWMSCVVQSTGQMQCKVYDSLLALPQDLQAARALCVIALLVALFGLLVYLAGAKCTTCVEEKDSKARLVLTSGIVFVISGVLTLIPVCWTAHAIIRDFYNPLVAEAQKRELGASLYLGWAASGLLLLGGGLLCCTCPSGGSQGPSHYMARYSTSAPAISRGPSEYPTKNYV

SEQ ID NO: 123 - protein, 21 aa, Homo sapiens
MALPVTALLLPLALLLHAARP

SEQ ID NO: 124 - protein, 15 aa, Homo sapiens
GGGGSGGGGSGGGGS

SEQ ID NO: 125 - protein, 45 aa, Artificial Sequence
  Synthesized
TTTPAPRPPTPAPTIASQPLSLRPEACRPAAGGAVHTRGLDFACD

SEQ ID NO: 126 - protein, 23 aa, Artificial Sequence
  Synthesized
YIWAPLAGTCGVLLLSLVITLYC

SEQ ID NO: 127 - protein, 42 aa, Artificial Sequence; identical to SEQ ID NO: 3
  Synthesized

SEQ ID NO: 128 - protein, 112 aa, Artificial Sequence; identical to SEQ ID NO: 4
  Synthesized

SEQ ID NO: 129 - protein, 485 aa, Artificial Sequence
  Synthesized
MALPVTALLLPLALLLHAARPQIVLTQSPAIMSASLGERVTMTCTASSVVISTYLHWYQQKPGSSPKLWIYSTSNLASGVPVRFSGSGSGTSYSLTISSMEAEDAATYYCHQYHRSPWTFGGGTKLEIKGGGGSGGGGSGGGGSEVQLQQSGPELVKPGGSMKISCKASGYSFTGYTMNWVKQSHGKNLEWIGLINPYNGGISYNQKFKDKATLTMDKSSSTAYMELLSLTSEDSAIYFCARDYRYEGFDYWGQGTLVTVSATTTPAPRPPTPAPTIASQPLSLRPEACRPAAGGAVHTRGLDFACDIYIWAPLAGTCGVLLLSLVITLYCKRGRKKLLYIFKQPFMRPVQTTQEEDGCSCRFPEEEEGGCELRVKFSRSADAPAYKQGQNQLYNELNLGRREEYDVLDKRRGRDPEMGGKPRRKNPQEGLYNELQKDKMAEAYSEIGMKGERRRGKGHDGLYQGLSTATKDTYDALHMQALPPR

SEQ ID NO: 130 - protein, 241 aa, Artificial Sequence
  Synthesized
QIVLTQSPAIMSASLGERVTMTCTASSVVISTYLHWYQQKPGSSPKLWIYSTSNLASGVPVRFSGSGSGTSYSLTISSMEAEDAATYYCHQYHRSPWTFGGGTKLEIKGGGGSGGGGSGGGGSEVQLQQSGPELVKPGGSMKISCKASGYSFTGYTMNWVKQSHGKNLEWIGLINPYNGGISYNQKFKDKATLTMDKSSSTAYMELLSLTSEDSAIYFCARDYRYEGFDYWGQGTLVTVSA

SEQ ID NO: 131 - protein, 108 aa, Artificial Sequence
  Synthesized
QIVLTQSPAIMSASLGERVTMTCTASSVVISTYLHWYQQKPGSSPKLWIYSTSNLASGVPVRFSGSGSGTSYSLTISSMEAEDAATYYCHQYHRSPWTFGGGTKLEIK

SEQ ID NO: 132 - protein, 118 aa, Artificial Sequence
  Synthesized
EVQLQQSGPELVKPGGSMKISCKASGYSFTGYTMNWVKQSHGKNLEWIGLINPYNGGISYNQKFKDKATLTMDKSSSTAYMELLSLTSEDSAIYFCARDYRYEGFDYWGQGTLVTVSA

SEQ ID NO: 133 - protein, 488 aa, Artificial Sequence
  Synthesized
MALPVTALLLPLALLLHAARPENVLTQSPAIMSATLGEKVTMSCRATSNVKYMYWYQQKSGASPKLWIYYTSNLASGVPARFSGSGSGTSYSLTISSVEAADAATYYCQQFTSSPSTFGAGTKLELKGGGGSGGGGSGGGGSEVQLQQSGPELVKPGASVKISCKASGYSFTGYFMNWVKQSHGKSLEWIGRINPYNGDTFYNQKFKGKATLTVDKSSNTAHMELRSLTSEDSAVYYCARVLFLDFDDPYLMDYWGQGTSVTVSSTTTPAPRPPTPAPTIASQPLSLRPEACRPAAGGAVHTRGLDFACDIYIWAPLAGTCGVLLLSLVITLYCKRGRKKLLYIFKQPFMRPVQTTQEEDGCSCRFPEEEEGGCELRVKFSRSADAPAYKQGQNQLYNELNLGRREEYDVLDKRRGRDPEMGGKPRRKNPQEGLYNELQKDKMAEAYSEIGMKGERRRGKGHDGLYQGLSTATKDTYDALHMQALPPR

SEQ ID NO: 134 - protein, 244 aa, Artificial Sequence
  Synthesized
ENVLTQSPAIMSATLGEKVTMSCRATSNVKYMYWYQQKSGASPKLWIYYTSNLASGVPARFSGSGSGTSYSLTISSVEAADAATYYCQQFTSSPSTFGAGTKLELKGGGGSGGGGSGGGGSEVQLQQSGPELVKPGASVKISCKASGYSFTGYFMNWVKQSHGKSLEWIGRINPYNGDTFYNQKFKGKATLTVDKSSNTAHMELRSLTSEDSAVYYCARVLFLDFDDPYLMDYWGQGTSVTVSS

SEQ ID NO: 135 - protein, 106 aa, Artificial Sequence
  Synthesized
NVLTQSPAIMSATLGEKVTMSCRATSNVKYMYWYQQKSGASPKLWIYYTSNLASGVPARFSGSGSGTSYSLTISSVEAADAATYYCQQFTSSPSTFGAGTKLELKE

SEQ ID NO: 136 - protein, 123 aa, Artificial Sequence
  Synthesized
EVQLQQSGPELVKPGASVKISCKASGYSFTGYFMNWVKQSHGKSLEWIGRINPYNGDTFYNQKFKGKATLTVDKSSNTAHMELRSLTSEDSAVYYCARVLFLDFDDPYLMDYWGQGTSVTVSS

SEQ ID NO: 137 - protein, 485 aa, Artificial Sequence
  Synthesized
MALPVTALLLPLALLLHAARPDIQMTQSPASLSASVGETVTITCRASENIDSYLAWYQQKQGKSPQLLVYASTLLVDGVPSRFSGSRSGTQFSLKINSLQSEDVARYYCQHYYSIPYTFGSGTKLEIKGGGGSGGGGSGGGGSEVKLVESGGGLVKPGGSLKLSCAASGFTFNSYTMSWVRQTPAKRLEWVVTISSGGGRTYYPDSVKGRFTISRDNARNTLYLQMSSLRSEDTAMYYCIRGDYRYDGFAYWGQGTLVTVSTTTTPAPRPPTPAPTIASQPLSLRPEACRPAAGGAVHTRGLDFACDIYIWAPLAGTCGVLLLSLVITLYCKRGRKKLLYIFKQPFMRPVQTTQEEDGCSCRFPEEEEGGCELRVKFSRSADAPAYKQGQNQLYNELNLGRREEYDVLDKRRGRDPEMGGKPRRKNPQEGLYNELQKDKMAEAYSEIGMKGERRRGKGHDGLYQGLSTATKDTYDALHMQALPPR

SEQ ID NO: 138 - protein, 241 aa, Artificial Sequence
  Synthesized
DIQMTQSPASLSASVGETVTITCRASENIDSYLAWYQQKQGKSPQLLVYASTLLVDGVPSRFSGSRSGTQFSLKINSLQSEDVARYYCQHYYSIPYTFGSGTKLEIKGGGGSGGGGSGGGGSEVKLVESGGGLVKPGGSLKLSCAASGFTFNSYTMSWVRQTPAKRLEWVVTISSGGGRTYYPDSVKGRFTISRDNARNTLYLQMSSLRSEDTAMYYCIRGDYRYDGFAYWGQGTLVTVST

SEQ ID NO: 139 - protein, 107 aa, Artificial Sequence
  Synthesized
DIQMTQSPASLSASVGETVTITCRASENIDSYLAWYQQKQGKSPQLLVYASTLLVDGVPSRFSGSRSGTQFSLKINSLQSEDVARYYCQHYYSIPYTFGSGTKLEIK

SEQ ID NO: 140 - protein, 119 aa, Artificial Sequence
  Synthesized
EVKLVESGGGLVKPGGSLKLSCAASGFTFNSYTMSWVRQTPAKRLEWVVTISSGGGRTYYPDSVKGRFTISRDNARNTLYLQMSSLRSEDTAMYYCIRGDYRYDGFAYWGQGTLVTVST

SEQ ID NO: 141 - protein, 488 aa, Artificial Sequence
  Synthesized
MALPVTALLLPLALLLHAARPENVLTQSPAIMSATLGEKVTMSCRATSNVKYMYWYQQKSGASPKLWIYYTSNLASGVPARFSGSGSGTSYSLTISSVEAADAATYYCQQFTSSPSTFGAGTKLELKGGGGSGGGGSGGGGSEVQLQQSGPELVKPGASVKISCKASGYSFTGYFMNWVKQSHGKSLEWIGRINPYNGDTFYNQKFKGKATLTVDKSSSTAHMELRSLTSEDSAVYYCARVLFLDFDDPYLMDYWGQGTSVTVSSTTTPAPRPPTPAPTIASQPLSLRPEACRPAAGGAVHTRGLDFACDIYIWAPLAGTCGVLLLSLVITLYCKRGRKKLLYIFKQPFMRPVQTTQEEDGCSCRFPEEEEGGCELRVKFSRSADAPAYKQGQNQLYNELNLGRREEYDVLDKRRGRDPEMGGKPRRKNPQEGLYNELQKDKMAEAYSEIGMKGERRRGKGHDGLYQGLSTATKDTYDALHMQALPPR

SEQ ID NO: 142 - protein, 244 aa, Artificial Sequence
  Synthesized
ENVLTQSPAIMSATLGEKVTMSCRATSNVKYMYWYQQKSGASPKLWIYYTSNLASGVPARFSGSGSGTSYSLTISSVEAADAATYYCQQFTSSPSTFGAGTKLELKGGGGSGGGGSGGGGSEVQLQQSGPELVKPGASVKISCKASGYSFTGYFMNWVKQSHGKSLEWIGRINPYNGDTFYNQKFKGKATLTVDKSSSTAHMELRSLTSEDSAVYYCARVLFLDFDDPYLMDYWGQGTSVTVSS

SEQ ID NO: 143 - protein, 106 aa, Artificial Sequence
  Synthesized
ENVLTQSPAIMSATLGEKVTMSCRATSNVKYMYWYQQKSGASPKLWIYYTSNLASGVPARFSGSGSGTSYSLTISSVEAADAATYYCQQFTSSPSTFGAGTKLELK

SEQ ID NO: 144 - protein, 123 aa, Artificial Sequence
  Synthesized
EVQLQQSGPELVKPGASVKISCKASGYSFTGYFMNWVKQSHGKSLEWIGRINPYNGDTFYNQKFKGKATLTVDKSSSTAHMELRSLTSEDSAVYYCARVLFLDFDDPYLMDYWGQGTSVTVSS

SEQ ID NO: 145 - protein, 482 aa, Artificial Sequence
  Synthesized
MALPVTALLLPLALLLHAARPSSELTQDPAVSVALGQTVRITCRGDSLRKYYASWYQQKPRQAPQLVIYHKNNRASGIPDRFSGSISGNTASLTITGAQAEDEAAYFCNSRDTSGNYLVFGGGTKVTVLGGGGGSGGGGSGGGGSQLQLQESGPGLVKPSETLSLTCAVSGASISNWWSWVRQPPGKGLEWIGEVHHSGVTTYKPSLKSRVTISVDNSKNQLSLKLTSVTAADTAVYYCAREFADDAFDIWGRGTMVTVTTTPAPRPPTPAPTIASQPLSLRPEACRPAAGGAVHTRGLDFACDIYIWAPLAGTCGVLLLSLVITLYCKRGRKKLLYIFKQPFMRPVQTTQEEDGCSCRFPEEEEGGCELRVKFSRSADAPAYKQGQNQLYNELNLGRREEYDVLDKRRGRDPEMGGKPRRKNPQEGLYNELQKDKMAEAYSEIGMKGERRRGKGHDGLYQGLSTATKDTYDALHMQALPPR

SEQ ID NO: 146 - protein, 238 aa, Artificial Sequence
  Synthesized
SSELTQDPAVSVALGQTVRITCRGDSLRKYYASWYQQKPRQAPQLVIYHKNNRASGIPDRFSGSISGNTASLTITGAQAEDEAAYFCNSRDTSGNYLVFGGGTKVTVLGGGGGSGGGGSGGGGSQLQLQESGPGLVKPSETLSLTCAVSGASISNWWSWVRQPPGKGLEWIGEVHHSGVTTYKPSLKSRVTISVDNSKNQLSLKLTSVTAADTAVYYCAREFADDAFDIWGRGTMVTV

SEQ ID NO: 147 - protein, 109 aa, Artificial Sequence
  Synthesized
SSELTQDPAVSVALGQTVRITCRGDSLRKYYASWYQQKPRQAPQLVIYHKNNRASGIPDRFSGSISGNTASLTITGAQAEDEAAYFCNSRDTSGNYLVFGGGTKVTVLG

SEQ ID NO: 148 - protein, 114 aa, Artificial Sequence
  Synthesized
QLQLQESGPGLVKPSETLSLTCAVSGASISNWWSWVRQPPGKGLEWIGEVHHSGVTTYKPSLKSRVTISVDNSKNQLSLKLTSVTAADTAVYYCAREFADDAFDIWGRGTMVTV

SEQ ID NO: 149 - protein, 250 aa, Artificial Sequence
  Synthesized
DIVMTQSPLSLPVTPGEPASISCRSTKSLLHSNGNTYLYWYLQKPGQSPQLLIYRMSNLASGVPDRFSGSGSGTDFTLKISRVEAEDVGVYYCMQHLEYPFTFGGGTKVEIKGGGGSGGGGSGGGGSEIQLQQSGAEVKKPGSSVKVSCKASGYTFTDYDMHWVRQAPGQGLEWMGTIDPETGGTAYNQKFKGRVTITADKSTSTAYMELSSLRSEDTAVYYCTSFYYTYSNYDVGFAYWGQGTLVTVSS

SEQ ID NO: 150 - protein, 250 aa, Artificial Sequence
  Synthesized
DIVMTQSPLSLPVTPGEPASISCRSTKSLLHSNGNTYLYWYLQKPGQSPQLLIYRMSNLASGVPDRFSGSGSGTDFTLKISRVEAEDVGVYYCMQHLEYPFTFGGGTKVEIKGGGGSGGGGSGGGGSEIQLQQSGAEVKKPGSSVKVSCKASGYTFTDYDMHWVRQAPGQGLEWIGTIDPETGGTAYNQKFKGRATLTADRSTSTAYMELSSLRSEDTAVYYCTSFYYTYSNYDVGFAYWGQGTLVTVSS

SEQ ID NO: 151 - protein, 250 aa, Artificial Sequence
  Synthesized
DIVMTQSPLSLPVTPGEPASISCRSTKSLLHSNGNTYLYWYLQKPGQSPQLLIYRMSNLASGVPDRFSGSGSGTDFTLKISRVEAEDVGVYYCMQHLEYPFTFGGGTKVEIKGGGGSGGGGSGGGGSEIQLQQSGAEVKKPGSSVKVSCKASGYTFTDYDMHWVKQAPGQGLEWIGTIDPETGGTAYNQKFKGKATLTADRSTSTAYMELSSLRSEDTAVYYCTSFYYTYSNYDVGFAYWGQGTLVTVSS

SEQ ID NO: 152 - protein, 250 aa, Artificial Sequence
  Synthesized
DIVMTQSPLSLPVTPGEPASISCRSTKSLLHSNGNTYLYWYLQKPGQSPQLLIYRMSNLASGVPDRFSGSGSGTDFTLKISRVEAEDVGVYYCMQHLEYPFTFGGGTKVEIKGGGGSGGGGSGGGGSEIQLQQSGAEVKKPGSSVKVSCKASGYTFTDYDMHWVKQAPGHGLEWIGTIDPETGGTAYNQKFKGKATLTADRSTSTAYMELSSLTSEDTAVYYCTSFYYTYSNYDVGFAYWGQGTLVTVSS

SEQ ID NO: 153 - protein, 250 aa, Artificial Sequence
  Synthesized
DIVMTQSPLSLPVTPGEPASISCRSTKSLLHSNGNTYLYWFLQKPGQSPQLLIYRMSNLASGVPDRFSGSGSGTDFTLKISRVEAEDVGVYYCMQHLEYPFTFGGGTKVEIKGGGGSGGGGSGGGGSEIQLQQSGAEVKKPGSSVKVSCKASGYTFTDYDMHWVRQAPGQGLEWMGTIDPETGGTAYNQKFKGRVTITADKSTSTAYMELSSLRSEDTAVYYCTSFYYTYSNYDVGFAYWGQGTLVTVSS

SEQ ID NO: 154 - protein, 250 aa, Artificial Sequence
  Synthesized
DIVMTQSPLSLPVTPGEPASISCRSTKSLLHSNGNTYLYWFLQKPGQSPQLLIYRMSNLASGVPDRFSGSGSGTDFTLKISRVEAEDVGVYYCMQHLEYPFTFGGGTKVEIKGGGGSGGGGSGGGGSEIQLQQSGAEVKKPGSSVKVSCKASGYTFTDYDMHWVRQAPGQGLEWIGTIDPETGGTAYNQKFKGRATLTADRSTSTAYMELSSLRSEDTAVYYCTSFYYTYSNYDVGFAYWGQGTLVTVSS

SEQ ID NO: 155 - protein, 250 aa, Artificial Sequence
  Synthesized
DIVMTQSPLSLPVTPGEPASISCRSTKSLLHSNGNTYLYWFLQKPGQSPQLLIYRMSNLASGVPDRFSGSGSGTDFTLKISRVEAEDVGVYYCMQHLEYPFTFGGGTKVEIKGGGGSGGGGSGGGGSEIQLQQSGAEVKKPGSSVKVSCKASGYTFTDYDMHWVKQAPGQGLEWIGTIDPETGGTAYNQKFKGKATLTADRSTSTAYMELSSLRSEDTAVYYCTSFYYTYSNYDVGFAYWGQGTLVTVSS

SEQ ID NO: 156 - protein, 250 aa, Artificial Sequence
  Synthesized
DIVMTQSPLSLPVTPGEPASISCRSTKSLLHSNGNTYLYWFLQKPGQSPQLLIYRMSNLASGVPDRFSGSGSGTDFTLKISRVEAEDVGVYYCMQHLEYPFTFGGGTKVEIKGGGGSGGGGSGGGGSEIQLQQSGAEVKKPGSSVKVSCKASGYTFTDYDMHWVKQAPGHGLEWIGTIDPETGGTAYNQKFKGKATLTADRSTSTAYMELSSLTSEDTAVYYCTSFYYTYSNYDVGFAYWGQGTLVTVSS

SEQ ID NO: 157 - protein, 112 aa, Artificial Sequence
  Synthesized
DIVMTQSPLSLPVTPGEPASISCRSTKSLLHSNGNTYLYWYLQKPGQSPQLLIYRMSNLASGVPDRFSGSGSGTDFTLKISRVEAEDVGVYYCMQHLEYPFTFGGGTKVEIK

SEQ ID NO: 158 - protein, 112 aa, Artificial Sequence
  Synthesized
DIVMTQSPLSLPVTPGEPASISCRSTKSLLHSNGNTYLYWFLQKPGQSPQLLIYRMSNLASGVPDRFSGSGSGTDFTLKISRVEAEDVGVYYCMQHLEYPFTFGGGTKVEIK

SEQ ID NO: 159 - protein, 123 aa, Artificial Sequence
  Synthesized
EIQLQQSGAEVKKPGSSVKVSCKASGYTFTDYDMHWVRQAPGQGLEWMGTIDPETGGTAYNQKFKGRVTITADKSTSTAYMELSSLRSEDTAVYYCTSFYYTYSNYDVGFAYWGQGTLVTVSS

SEQ ID NO: 160 - protein, 123 aa, Artificial Sequence
  Synthesized
EIQLQQSGAEVKKPGSSVKVSCKASGYTFTDYDMHWVRQAPGQGLEWIGTIDPETGGTAYNQKFKGRATLTADRSTSTAYMELSSLRSEDTAVYYCTSFYYTYSNYDVGFAYWGQGTLVTVSS

SEQ ID NO: 161 - protein, 123 aa, Artificial Sequence
  Synthesized
EIQLQQSGAEVKKPGSSVKVSCKASGYTFTDYDMHWVKQAPGQGLEWIGTIDPETGGTAYNQKFKGKATLTADRSTSTAYMELSSLRSEDTAVYYCTSFYYTYSNYDVGFAYWGQGTLVTVSS

SEQ ID NO: 162 - protein, 123 aa, Artificial Sequence
  Synthesized
EIQLQQSGAEVKKPGSSVKVSCKASGYTFTDYDMHWVKQAPGHGLEWIGTIDPETGGTAYNQKFKGKATLTADRSTSTAYMELSSLTSEDTAVYYCTSFYYTYSNYDVGFAYWGQGTLVTVSS

SEQ ID NO: 163 - protein, 482 aa, Artificial Sequence
  Synthesized
MALPVTALLLPLALLLHAARPDIQMTQSPSSLSASVGDRVTITCKASDLIHNWLAWYQQKPGKAPKLLIYGATSLETGVPSRFSGSGSGTDFTLTISSLQPEDFATYYCQQYWTTPFTFGQGTKVEIKGGGGSGGGGSGGGGSEVQLVESGGGLVQPGGSLRLSCAASGYSITNDYAWNWVRQAPGKGLEWVGYISYSGYTTYNPSLKSRFTISRDTSKNTLYLQMNSLRAEDTAVYYCARWTSGLDYWGQGTLVTVSSTTTPAPRPPTPAPTIASQPLSLRPEACRPAAGGAVHTRGLDFACDIYIWAPLAGTCGVLLLSLVITLYCKRGRKKLLYIFKQPFMRPVQTTQEEDGCSCRFPEEEEGGCELRVKFSRSADAPAYKQGQNQLYNELNLGRREEYDVLDKRRGRDPEMGGKPRRKNPQEGLYNELQKDKMAEAYSEIGMKGERRRGKGHDGLYQGLSTATKDTYDALHMQALPPR

SEQ ID NO: 164 - protein, 238 aa, Artificial Sequence
  Synthesized
DIQMTQSPSSLSASVGDRVTITCKASDLIHNWLAWYQQKPGKAPKLLIYGATSLETGVPSRFSGSGSGTDFTLTISSLQPEDFATYYCQQYWTTPFTFGQGTKVEIKGGGGSGGGGSGGGGSEVQLVESGGGLVQPGGSLRLSCAASGYSITNDYAWNWVRQAPGKGLEWVGYISYSGYTTYNPSLKSRFTISRDTSKNTLYLQMNSLRAEDTAVYYCARWTSGLDYWGQGTLVTVSS

SEQ ID NO: 165 - protein, 107 aa, Artificial Sequence
  Synthesized
DIQMTQSPSSLSASVGDRVTITCKASDLIHNWLAWYQQKPGKAPKLLIYGATSLETGVPSRFSGSGSGTDFTLTISSLQPEDFATYYCQQYWTTPFTFGQGTKVEIK

SEQ ID NO: 166 - protein, 116 aa, Artificial Sequence
  Synthesized
EVQLVESGGGLVQPGGSLRLSCAASGYSITNDYAWNWVRQAPGKGLEWVGYISYSGYTTYNPSLKSRFTISRDTSKNTLYLQMNSLRAEDTAVYYCARWTSGLDYWGQGTLVTVSS

SEQ ID NO: 167 - protein, 482 aa, Artificial Sequence
  Synthesized
MALPVTALLLPLALLLHAARPDIQMTQSSSFLSVSLGGRVTITCKASDLIHNWLAWYQQKPGNAPRLLISGATSLETGVPSRFSGSGSGNDYTLSIASLQTEDAATYYCQQYWTTPFTFGSGTKVEIKGGGGSGGGGSGGGGSDVQLQESGPGLVNPSQSLSLTCTVTGYSITNDYAWNWIRQFPGNKLEWMGYINYSGYTTYNPSLKSRISITRDTSKNQFFLHLNSVTTEDTATYYCARWDGGLTYWGQGTLVTVSATTTPAPRPPTPAPTIASQPLSLRPEACRPAAGGAVHTRGLDFACDIYIWAPLAGTCGVLLLSLVITLYCKRGRKKLLYIFKQPFMRPVQTTQEEDGCSCRFPEEEEGGCELRVKFSRSADAPAYKQGQNQLYNELNLGRREEYDVLDKRRGRDPEMGGKPRRKNPQEGLYNELQKDKMAEAYSEIGMKGERRRGKGHDGLYQGLSTATKDTYDALHMQALPPR

SEQ ID NO: 168 - protein, 238 aa, Artificial Sequence
  Synthesized
DIQMTQSSSFLSVSLGGRVTITCKASDLIHNWLAWYQQKPGNAPRLLISGATSLETGVPSRFSGSGSGNDYTLSIASLQTEDAATYYCQQYWTTPFTFGSGTKVEIKGGGGSGGGGSGGGGSDVQLQESGPGLVNPSQSLSLTCTVTGYSITNDYAWNWIRQFPGNKLEWMGYINYSGYTTYNPSLKSRISITRDTSKNQFFLHLNSVTTEDTATYYCARWDGGLTYWGQGTLVTVSA

SEQ ID NO: 169 - protein, 107 aa, Artificial Sequence
  Synthesized
DIQMTQSSSFLSVSLGGRVTITCKASDLIHNWLAWYQQKPGNAPRLLISGATSLETGVPSRFSGSGSGNDYTLSIASLQTEDAATYYCQQYWTTPFTFGSGTKVEIK

SEQ ID NO: 170 - protein, 116 aa, Artificial Sequence
  Synthesized
DVQLQESGPGLVNPSQSLSLTCTVTGYSITNDYAWNWIRQFPGNKLEWMGYINYSGYTTYNPSLKSRISITRDTSKNQFFLHLNSVTTEDTATYYCARWDGGLTYWGQGTLVTVSA

SEQ ID NO: 171 - protein, 298 aa, Artificial Sequence
  Synthesized
MALPVTALLLPLALLLHAARPGTSLSPPPESSGSPQQPGLSAPHSRQIPAPQGAVLVQREKDLPNYNWNSFGLRFTTTPAPRPPTPAPTIASQPLSLRPEACRPAAGGAVHTRGLDFACDIYIWAPLAGTCGVLLLSLVITLYCKRGRKKLLYIFKQPFMRPVQTTQEEDGCSCRFPEEEEGGCELRVKFSRSADAPAYKQGQNQLYNELNLGRREEYDVLDKRRGRDPEMGGKPRRKNPQEGLYNELQKDKMAEAYSEIGMKGERRRGKGHDGLYQGLSTATKDTYDALHMQALPPR

SEQ ID NO: 172 - protein, 54 aa, Artificial Sequence
  Synthesized
GTSLSPPPESSGSPQQPGLSAPHSRQIPAPQGAVLVQREKDLPNYNWNSFGLRF

SEQ ID NO: 173 - protein, 19 aa, Artificial Sequence
  Synthesized
GTTGCTCCAGGCCACAGCA

SEQ ID NO: 174 - protein, 7 aa, Artificial Sequence
  Synthesized
QSGDLTR

SEQ ID NO: 175 - protein, 7 aa, Artificial Sequence
  Synthesized
QWGTRYR

SEQ ID NO: 176 - protein, 7 aa, Artificial Sequence
  Synthesized
ERGTLAR

SEQ ID NO: 177 - protein, 7 aa, Artificial Sequence
  Synthesized
RSDNLRE

SEQ ID NO: 178 - protein, 7 aa, Artificial Sequence
  Synthesized
QSGDLTR

SEQ ID NO: 179 - protein, 7 aa, Artificial Sequence
  Synthesized
TSGALTR

SEQ ID NO: 180 - protein, 12 aa, Artificial Sequence
  Synthesized
GACTTTGCATGT

SEQ ID NO: 181 - protein, 7 aa, Artificial Sequence
  Synthesized
WRSSLAS

SEQ ID NO: 182 - protein, 7 aa, Artificial Sequence
  Synthesized
QSGSLTR

SEQ ID NO: 183 - protein, 7 aa, Artificial Sequence
  Synthesized
HKWVLRQ

SEQ ID NO: 184 - protein, 7 aa, Artificial Sequence
  Synthesized
DRSNLTR

SEQ ID NO: 185 - protein, 293 aa, Artificial Sequence
  Synthesized
MQRISSLIHLSLFWAGVMSAIELVPEHQTVPVSIGVPATLRCSMKGEAIGNYYINWYRKTQGNTITFIYREKDIYGPGFKDNFQGDIDIAKNLAVLKILAPSERDEGSYYCACDTMGHPRGKLIFGKGTRVTVEPRSQPHTKPSVFVMKNGTNVACLVKEFYPKDIRINLVSSKKITEFDPAIVISPSGKYNAVKLGKYEDSNSVTCSVQHDNKTVHSTDFEVKTDSTDHVKPKETENTKQPSKSCHKPKAIVHTEKVNMMSLTVLGLRMLFAKTVAVNFLLTAKLFFLTRDC

SEQ ID NO: 186 - protein, 315 aa, Artificial Sequence
  Synthesized
MVSLLHASTLAVLGALCVYGAGHLEQPQISSTKTLSKTARLECVVSGITISATSVYWYRERPGEVIQFLVSISYDGTVRKESGIPSGKFEVDRIPETSTSTLTIHNVEKQDIATYYCALWEAQQELGKKIKVFGPGTKLIITDKQLDADVSPKPTIFLPSIAETKLQKAGTYLCLLEKFFPDVIKIHWEEKKSNTILGSQEGNTMKTNDTYMKFSWLTVPEKSLDKEHRCIVRHENNKNGVDQEIIFPPIKTDVITMDPKDNCSKDANDTLLLQLTNTSAYYMYLLLLLKSVVYFAIITCCLLRRTAFCCNGEKS

SEQ ID NO: 187 - protein, 292 aa, Artificial Sequence
  Synthesized
MERISSLIHLSLFWAGVMSAIELVPEHQTVPVSIGVPATLRCSMKGEAIGNYYINWYRKTQGNTMTFIYREKDIYGPGFKDNFQGDIDIAKNLAVLKILAPSERDEGSYYCACDTLGMGGEYTDKLIFGKGTRVTVEPRSQPHTKPSVFVMKNGTNVACLVKEFYPKDIRINLVSSKKITEFDPAIVISPSGKYNAVKLGKYEDSNSVTCSVQHDNKTVHSTDFEVKTDSTDHVKPKETENTKQPSKSCHKPKAIVHTEKVNMMSLTVLGLRMLFAKTVAVNFLLTAKLFFL

SEQ ID NO: 188 - protein, 313 aa, Artificial Sequence
  Synthesized
MVSLLHASTLAVLGALCVYGAGHLEQPQISSTKTLSKTARLECVVSGITISATSVYWYRERPGEVIQFLVSISYDGTVRKESGIPSGKFEVDRIPETSTSTLTIHNVEKQDIATYYCALWEWELGKKIKVFGPGTKLIITDKQLDADVSPKPTIFLPSIAETKLQKAGTYLCLLEKFFPDVIKIHWEEKKSNTILGSQEGNTMKTNDTYMKFSWLTVPEKSLDKEHRCIVRHENNKNGVDQEIIFPPIKTDVITMDPKDNCSKDANDTLLLQLTNTSAYYMYLLLLLKSVVYFAIITCCLLRRTAFCCNGEKS

SEQ ID NO: 189 - protein, 288 aa, Artificial Sequence
  Synthesized
MERISSLIHLSLFWAGVMSAIELVPEHQTVPVSIGVPATLRCSMKGEAIGNYYINWYRKTQGNTMTFIYREKDIYGPGFKDNFQGDIDIAKNLAVLKILAPSERDEGSYYCACDTLVSTDKLIFGKGTRVTVEPRSQPHTKPSVFVMKNGTNVACLVKEFYPKDIRINLVSSKKITEFDPAIVISPSGKYNAVKLGKYEDSNSVTCSVQHDNKTVHSTDFEVKTDSTDHVKPKETENTKQPSKSCHKPKAIVHTEKVNMMSLTVLGLRMLFAKTVAVNFLLTAKLFFL

SEQ ID NO: 190 - protein, 314 aa, Artificial Sequence
  Synthesized
MVSLLHASTLAVLGALCVYGAGHLEQPQISSTKTLSKTARLECVVSGITISATSVYWYRERPGEVIQFLVSISYDGTVRKESGIPSGKFEVDRIPETSTSTLTIHNVEKQDIATYYCALWEVGELGKKIKVFGPGTKLIITDKQLDADVSPKPTIFLPSIAETKLQKAGTYLCLLEKFFPDVIKIHWEEKKSNTILGSQEGNTMKTNDTYMKFSWLTVPEKSLDKEHRCIVRHENNKNGVDQEIIFPPIKTDVITMDPKDNCSKDANDTLLLQLTNTSAYYMYLLLLLKSVVYFAIITCCLLRRTAFCCNGEKS

SEQ ID NO: 191 - protein, 291 aa, Artificial Sequence
  Synthesized
MERISSLIHLSLFWAGVMSAIELVPEHQTVPVSIGVPATLRCSMKGEAIGNYYINWYRKTQGNTMTFIYREKDIYGPGFKDNFQGDIDIAKNLAVLKILAPSERDEGSYYCACDTVAHGGGTDKLIFGKGTRVTVEPRSQPHTKPSVFVMKNGTNVACLVKEFYPKDIRINLVSSKKITEFDPAIVISPSGKYNAVKLGKYEDSNSVTCSVQHDNKTVHSTDFEVKTDSTDHVKPKETENTKQPSKSCHKPKAIVHTEKVNMMSLTVLGLRMLFAKTVAVNFLLTAKLFFL

SEQ ID NO: 192 - protein, 313 aa, Artificial Sequence; identical to SEQ ID NO: 188
  Synthesized

SEQ ID NO: 193 - protein, 291 aa, Artificial Sequence
  Synthesized
MERISSLIHLSLFWAGVMSAIELVPEHQTVPVSIGVPATLRCSMKGEAIGNYYINWYRKTQGNTMTFIYREKDIYGPGFKDNFQGDIDIAKNLAVLKILAPSERDEGSYYCACDNLSTGGYTDKLIFGKGTRVTVEPRSQPHTKPSVFVMKNGTNVACLVKEFYPKDIRINLVSSKKITEFDPAIVISPSGKYNAVKLGKYEDSNSVTCSVQHDNKTVHSTDFEVKTDSTDHVKPKETENTKQPSKSCHKPKAIVHTEKVNMMSLTVLGLRMLFAKTVAVNFLLTAKLFFL

SEQ ID NO: 194 - protein, 316 aa, Artificial Sequence
  Synthesized
MVSLLHASTLAVLGALCVYGAGHLEQPQISSTKTLSKTARLECVVSGITISATSVYWYRERPGEVIQFLVSISYDGTVRKESGIPSGKFEVDRIPETSTSTLTIHNVEKQDIATYYCALWEVYQGELGKKIKVFGPGTKLIITDKQLDADVSPKPTIFLPSIAETKLQKAGTYLCLLEKFFPDVIKIHWEEKKSNTILGSQEGNTMKTNDTYMKFSWLTVPEKSLDKEHRCIVRHENNKNGVDQEIIFPPIKTDVITMDPKDNCSKDANDTLLLQLTNTSAYYMYLLLLLKSVVYFAIITCCLLRRTAFCCNGEKS

SEQ ID NO: 195 - protein, 291 aa, Artificial Sequence
  Synthesized
MERISSLIHLSLFWAGVMSAIELVPEHQTVPVSIGVPATLRCSMKGEAIGNYYINWYRKTQGNTMTFIYREKDIYGPGFKDNFQGDIDIAKNLAVLKILAPSERDEGSYYCACDILGEKPYTDKLIFGKGTRVTVEPRSQPHTKPSVFVMKNGTNVACLVKEFYPKDIRINLVSSKKITEFDPAIVISPSGKYNAVKLGKYEDSNSVTCSVQHDNKTVHSTDFEVKTDSTDHVKPKETENTKQPSKSCHKPKAIVHTEKVNMMSLTVLGLRMLFAKTVAVNFLLTAKLFFL

SEQ ID NO: 196 - DNA, 339 bp, Artificial Sequence; identical to SEQ ID NO: 41
  Synthesized

SEQ ID NO: 197 - protein, 276 aa, Artificial Sequence
  Synthesized
MKKHLTTFLVILWLYFYRGNGKNQVEQSPQSLIILEGKNCTLQCNYTVSPFSNLRWYKQDTGRGPVSLTIMTFSENTKSNGRYTATLDADTKQSSLHITASQLSDSASYICVVSDRGSTLGRLYFGRGTQLTVWPDIQNPDPAVYQLRDSKSSDKSVCLFTDFDSQTNVSQSKDSDVYITDKTVLDMRSMDFKSNSAVAWSNKSDFACANAFNNSIIPEDTFFPSPESSCDVKLVEKSFETDTNLNFQNLSVIGFRILLLKVAGFNLLMTLRLWSS

SEQ ID NO: 198 - protein, 313 aa, Artificial Sequence
  Synthesized
MTIRLLCYVGFYFLGAGLMEADIYQTPRYLVIGTGKKITLECSQTMGHDKMYWYQQDPGMELHLIHYSYGVNSTEKGDLSSESTVSRIRTEHFPLTLESARPSHTSQYLCASSGLRDRGLYEQYFGPGTRLTVTEDLKNVFPPEVAVFEPSEAEISHTQKATLVCLATGFYPDHVELSWWVNGKEVHSGVSTDPQPLKEQPALNDSRYCLSSRLRVSATFWQNPRNHFRCQVQFYGLSENDEWTQDRAKPVTQIVSAEAWGRADCGFTSESYQQGVLSATILYEILLGKATLYAVLVSALVLMAMVKRKDSRG

SEQ ID NO: 199 - protein, 267 aa, Artificial Sequence
  Synthesized
MWGVFLLYVSMKMGGTTGQNIDQPTEMTATEGAIVQINCTYQTSGFNGLFWYQQHAGEAPTFLSYNVLDGLEEKGRFSSFLSRSKGYSYLLLKELQMKDSASYLCAVKDSNYQLIWGAGTKLIIKPNIQNPDPAVYQLRDSKSSDKSVCLFTDFDSQTNVSQSKDSDVYITDKTVLDMRSMDFKSNSAVAWSNKSDFACANAFNNSIIPEDTFFPSPESSCDVKLVEKSFETDTNLNFQNLSVIGFRILLLKVAGFNLLMTLRLWSS

SEQ ID NO: 200 - protein, 138 aa, Artificial Sequence
  Synthesized
MAVLVLLLCLLIFPSCVLSQVQLKESGPGLVQPSQTLSLTCTVSGSSLTSNSVSWIRQPPGKGLEWMGVIWSNGDADYNSAIKSRLSISRDTSKSQVFLKMNSLQTEDTAMYFCASPYYGYYFPFDYWGQGVMVTVSS

SEQ ID NO: 201 - DNA, 3533 bp, Artificial Sequence
  Synthesized
atggccttaccagtgaccgccttgctcctgccgctggccttgctgctccacgccgccaggccggatattgtgatgacccagtccccgtcctccctgaccgtgaccgcgggcgaaaaagtgaccatgatttgcaaatcctcccagtccctgctgaattccggcgatcagaaaaattatctgacctggtatcagcagaaaccgggccagccgccgaaactgctgattttttgggcgtccacccgtgaatccggcgtgccggatcgttttaccggctccggctccggcaccgattttaccctgaccatttcctccgtgcaggcggaagatctggcggtgtattattgccagaatgattattcctatccgctgacctttggcgcgggcaccaaactggaactgaaaggcggcggcggctccggcggcggcggctccggcggcggcggctcccaggtgcagctgcagcagtccgatgcggaactggtgaaaccgggctcctccgtgaaaatttcctgcaaagcgtccggctatacctttaccgatcatgcgattcattgggtgaaacagaaaccggaacagggcctggaatggattggccatttttccccgggcaataccgatattaaatataatgataaatttaaaggcaaagcgaccctgaccgtggatcgttcctcctccaccgcgtatatgcagctgaattccctgacctccgaagattccgcggtgtatttttgcaaaacctccacctttttttttgattattggggccagggcaccaccctgaccgtgtcctccaccacgacgccagcgccgcgaccaccaacaccggcgcccaccatcgcgtcgcagcccctgtccctgcgcccagaggcgtgccggccagcggcggggggcgcagtgcacacgagggggctggacttcgcctgtgatatctacatctgggcgcccttggccgggacttgtggggtccttctcctgtcactggttatcaccctttactgcaaacggggcagaaagaaactcctgtatatattcaaacaaccatttatgagaccagtacaaactactcaagaggaagatggctgtagctgccgatttccagaagaagaagaaggaggatgtgaactgagagtgaagttcagcaggagcgcagacgcccccgcgtacaagcagggccagaaccagctctataacgagctcaatctaggacgaagagaggagtacgatgttttggacaagaggcgtggccgggaccctgagatggggggaaagccgagaaggaagaaccctcaggaaggcctgtacaatgaactgcagaaagataagatggcggaggcctacagtgagattgggatgaaaggcgagcgccggaggggcaaggggcacgatggcctttaccagggtctcagtacagccaccaaggacacctacgacgcccttcacatgcaggccctgccccctcgctaatctagaggcgcgcccctctccctcccccccccctaacgttactggccgaagccgcttggaataaggccggtgtgcgtttgtctatatgttattttccaccatattgccgtcttttggcaatgtgagggcccggaaacctggccctgtcttcttgacgagcattcctaggggtctttcccctctcgccaaaggaatgcaaggtctgttgaatgtcgtgaaggaagcagttcctctggaagcttcttgaagacaaacaacgtctgtagcgaccctttgcaggcagcggaaccccccacctggcgacaggtgcctctgcggccaaaagccacgtgtataagatacacctgcaaaggcggcacaaccccagtgccacgttgtgagttggatagttgtggaaagagtcaaatggctctcctcaagcgtattcaacaaggggctgaaggatgcccagaaggtaccccattgtatgggatctgatctggggcctcggtacacatgctttacatgtgtttagtcgaggttaaaaaaacgtctaggccccccgaaccacggggacgtggttttcctttgaaaaacacgatgataatatggccacaacccatatgatggccttaccagtgaccgccttgctcctgccgctggccttgctgctccacgccgccaggccggacatccagatgacacagactacatcctccctgtctgcctctctgggagacagagtcaccatcagttgcagggcaagtcaggacattagtaaatatttaaattggtatcagcagaaaccagatggaactgttaaactcctgatctaccatacatcaagattacactcaggagtcccatcaaggttcagtggcagtgggtctggaacagattattctctcaccattagcaacctggagcaagaagatattgccacttacttttgccaacagggtaatacgcttccgtacacgttcggaggggggaccaagctggagatcacaggtggcggtggctcgggcggtggtgggtcgggtggcggcggatctgaggtgaaactgcaggagtcaggacctggcctggtggcgccctcacagagcctgtccgtcacatgcactgtctcaggggtctcattacccgactatggtgtaagctggattcgccagcctccacgaaagggtctggagtggctgggagtaatatggggtagtgaaaccacatactataattcagctctcaaatccagactgaccatcatcaaggacaactccaagagccaagttttcttaaaaatgaacagtctgcaaactgatgacacagccatttactactgtgccaaacattattactacggtggtagctatgctatggactactggggccaaggaacctcagtcaccgtctcctcaaccacgacgccagcgccgcgaccaccaacaccggcgcccaccatcgcgtcgcagcccctgtccctgcgcccagaggcgtgccggccagcggcggggggcgcagtgcacacgagggggctggacttcgcctgtgatatctacatctgggcgcccttggccgggacttgtggggtccttctcctgtcactggttatcaccctttactgcaaacggggcagaaagaaactcctgtatatattcaaacaaccatttatgagaccagtacaaactactcaagaggaagatggctgtagctgccgatttccagaagaagaagaaggaggatgtgaactgagagtgaagttcagcaggagcgcagacgcccccgcgtacaagcagggccagaaccagctctataacgagctcaatctaggacgaagagaggagtacgatgttttggacaagaggcgtggccgggaccctgagatggggggaaagccgagaaggaagaaccctcaggaaggcctgtacaatgaactgcagaaagataagatggcggaggcctacagtgagattgggatgaaaggcgagcgccggaggggcaaggggcacgatggcctttaccagggtctcagtacagccaccaaggacacctacgacgcccttcacatgcaggccctgccccctcgctaa

SEQ ID NO: 202 - protein, 488 aa, Artificial Sequence
  Synthesized
MALPVTALLLPLALLLHAARPDIVMTQSPSSLTVTAGEKVTMICKSSQSLLNSGDQKNYLTWYQQKPGQPPKLLIFWASTRESGVPDRFTGSGSGTDFTLTISSVQAEDLAVYYCQNDYSYPLTFGAGTKLELKGGGGSGGGGSGGGGSQVQLQQSDAELVKPGSSVKISCKASGYTFTDHAIHWVKQKPEQGLEWIGHFSPGNTDIKYNDKFKGKATLTVDRSSSTAYMQLNSLTSEDSAVYFCKTSTFFFDYWGQGTTLTVSSTTTPAPRPPTPAPTIASQPLSLRPEACRPAAGGAVHTRGLDFACDIYIWAPLAGTCGVLLLSLVITLYCKRGRKKLLYIFKQPFMRPVQTTQEEDGCSCRFPEEEEGGCELRVKFSRSADAPAYQQGQNQLYNELNLGRREEYDVLDKRRGRDPEMGGKPRRKNPQEGLYNELQKDKMAEAYSEIGMKGERRRGKGHDGLYQGLSTATKDTYDALHMQALPPR

SEQ ID NO: 203 - protein, 486 aa, Artificial Sequence
  Synthesized
MALPVTALLLPLALLLHAARPDIQMTQTTSSLSASLGDRVTISCRASQDISKYLNWYQQKPDGTVKLLIYHTSRLHSGVPSRFSGSGSGTDYSLTISNLEQEDIATYFCQQGNTLPYTFGGGTKLEITGGGGSGGGGSGGGGSEVKLQESGPGLVAPSQSLSVTCTVSGVSLPDYGVSWIRQPPRKGLEWLGVIWGSETTYYNSALKSRLTIIKDNSKSQVFLKMNSLQTDDTAIYYCAKHYYYGGSYAMDYWGQGTSVTVSSTTTPAPRPPTPAPTIASQPLSLRPEACRPAAGGAVHTRGLDFACDIYIWAPLAGTCGVLLLSLVITLYCKRGRKKLLYIFKQPFMRPVQTTQEEDGCSCRFPEEEEGGCELRVKFSRSADAPAYQQGQNQLYNELNLGRREEYDVLDKRRGRDPEMGGKPRRKNPQEGLYNELQKDKMAEAYSEIGMKGERRRGKGHDGLYQGLSTATKDTYDALHMQALPPR

SEQ ID NO: 204 - DNA, 3524 bp, Artificial Sequence
  Synthesized
atggccttaccagtgaccgccttgctcctgccgctggccttgctgctccacgccgccaggccggatattgtgatgacccagtccccgtcctccctgaccgtgaccgcgggcgaaaaagtgaccatgatttgcaaatcctcccagtccctgctgaattccggcgatcagaaaaattatctgacctggtatcagcagaaaccgggccagccgccgaaactgctgattttttgggcgtccacccgtgaatccggcgtgccggatcgttttaccggctccggctccggcaccgattttaccctgaccatttcctccgtgcaggcggaagatctggcggtgtattattgccagaatgattattcctatccgctgacctttggcgcgggcaccaaactggaactgaaaggcggcggcggctccggcggcggcggctccggcggcggcggctcccaggtgcagctgcagcagtccgatgcggaactggtgaaaccgggctcctccgtgaaaatttcctgcaaagcgtccggctatacctttaccgatcatgcgattcattgggtgaaacagaaaccggaacagggcctggaatggattggccatttttccccgggcaataccgatattaaatataatgataaatttaaaggcaaagcgaccctgaccgtggatcgttcctcctccaccgcgtatatgcagctgaattccctgacctccgaagattccgcggtgtatttttgcaaaacctccacctttttttttgattattggggccagggcaccaccctgaccgtgtcctccaccacgacgccagcgccgcgaccaccaacaccggcgcccaccatcgcgtcgcagcccctgtccctgcgcccagaggcgtgccggccagcggcggggggcgcagtgcacacgagggggctggacttcgcctgtgatatctacatctgggcgcccttggccgggacttgtggggtccttctcctgtcactggttatcaccaaacggggcagaaagaaactcctgtatatattcaaacaaccatttatgagaccagtacaaactactcaagaggaagatggctgtagctgccgatttccagaagaagaagaaggaggatgtgaactgagagtgaagttcagcaggagcgcagacgcccccgcgtacaagcagggccagaaccagctctataacgagctcaatctaggacgaagagaggagtacgatgttttggacaagaggcgtggccgggaccctgagatggggggaaagccgagaaggaagaaccctcaggaaggcctgtacaatgaactgcagaaagataagatggcggaggcctacagtgagattgggatgaaaggcgagcgccggaggggcaaggggcacgatggcctttaccagggtctcagtacagccaccaaggacacctacgacgcccttcacatgcaggccctgccccctcgctaatctagaggcgcgcccctctccctcccccccccctaacgttactggccgaagccgcttggaataaggccggtgtgcgtttgtctatatgttattttccaccatattgccgtcttttggcaatgtgagggcccggaaacctggccctgtcttcttgacgagcattcctaggggtctttcccctctcgccaaaggaatgcaaggtctgttgaatgtcgtgaaggaagcagttcctctggaagcttcttgaagacaaacaacgtctgtagcgaccctttgcaggcagcggaaccccccacctggcgacaggtgcctctgcggccaaaagccacgtgtataagatacacctgcaaaggcggcacaaccccagtgccacgttgtgagttggatagttgtggaaagagtcaaatggctctcctcaagcgtattcaacaaggggctgaaggatgcccagaaggtaccccattgtatgggatctgatctggggcctcggtacacatgctttacatgtgtttagtcgaggttaaaaaaacgtctaggccccccgaaccacggggacgtggttttcctttgaaaaacacgatgataatatggccacaacccatatgatggccttaccagtgaccgccttgctcctgccgctggccttgctgctccacgccgccaggccggacatccagatgacacagactacatcctccctgtctgcctctctgggagacagagtcaccatcagttgcagggcaagtcaggacattagtaaatatttaaattggtatcagcagaaaccagatggaactgttaaactcctgatctaccatacatcaagattacactcaggagtcccatcaaggttcagtggcagtgggtctggaacagattattctctcaccattagcaacctggagcaagaagatattgccacttacttttgccaacagggtaatacgcttccgtacacgttcggaggggggaccaagctggagatcacaggtggcggtggctcgggcggtggtgggtcgggtggcggcggatctgaggtgaaactgcaggagtcaggacctggcctggtggcgccctcacagagcctgtccgtcacatgcactgtctcaggggtctcattacccgactatggtgtaagctggattcgccagcctccacgaaagggtctggagtggctgggagtaatatggggtagtgaaaccacatactataattcagctctcaaatccagactgaccatcatcaaggacaactccaagagccaagttttcttaaaaatgaacagtctgcaaactgatgacacagccatttactactgtgccaaacattattactacggtggtagctatgctatggactactggggccaaggaacctcagtcaccgtctcctcaaccacgacgccagcgccgcgaccaccaacaccggcgcccaccatcgcgtcgcagcccctgtccctgcgcccagaggcgtgccggccagcggcggggggcgcagtgcacacgagggggctggacttcgcctgtgatatctacatctgggcgcccttggccgggacttgtggggtccttctcctgtcactggttatcaccctttactgcaaacggggcagaaagaaactcctgtatatattcaaacaaccatttatgagaccagtacaaactactcaagaggaagatggctgtagctgccgatttccagaagaagaagaaggaggatgtgaactgagagtgaagttcagcaggagcgcagacgcccccgcgtacaagcagggccagaaccagctctataacgagctcaatctaggacgaagagaggagtacgatgttttggacaagaggcgtggccgggaccctgagatggggggaaagccgagaaggaagaaccctcaggaaggcctgtacaatgaactgcagaaagataagatggcggaggcctacagtgagattgggatgaaaggcgagcgccggaggggcaaggggcacgatggcctttaccagggtctcagtacagccaccaaggacacctacgacgcccttcacatgcaggccctgccccctcgctaa

SEQ ID NO: 205 - protein, 485 aa, Artificial Sequence
  Synthesized
MALPVTALLLPLALLLHAARPDIVMTQSPSSLTVTAGEKVTMICKSSQSLLNSGDQKNYLTWYQQKPGQPPKLLIFWASTRESGVPDRFTGSGSGTDFTLTISSVQAEDLAVYYCQNDYSYPLTFGAGTKLELKGGGGSGGGGSGGGGSQVQLQQSDAELVKPGSSVKISCKASGYTFTDHAIHWVKQKPEQGLEWIGHFSPGNTDIKYNDKFKGKATLTVDRSSSTAYMQLNSLTSEDSAVYFCKTSTFFFDYWGQGTTLTVSSTTTPAPRPPTPAPTIASQPLSLRPEACRPAAGGAVHTRGLDFACDIYIWAPLAGTCGVLLLSLVITKRGRKKLLYIFKQPFMRPVQTTQEEDGCSCRFPEEEEGGCELRVKFSRSADAPAYQQGQNQLYNELNLGRREEYDVLDKRRGRDPEMGGKPRRKNPQEGLYNELQKDKMAEAYSEIGMKGERRRGKGHDGLYQGLSTATKDTYDALHMQALPPR

SEQ ID NO: 206 - DNA, 3524 bp, Artificial Sequence
  Synthesized
atggccttaccagtgaccgccttgctcctgccgctggccttgctgctccacgccgccaggccggatattgtgatgacccagtccccgtcctccctgaccgtgaccgcgggcgaaaaagtgaccatgatttgcaaatcctcccagtccctgctgaattccggcgatcagaaaaattatctgacctggtatcagcagaaaccgggccagccgccgaaactgctgattttttgggcgtccacccgtgaatccggcgtgccggatcgttttaccggctccggctccggcaccgattttaccctgaccatttcctccgtgcaggcggaagatctggcggtgtattattgccagaatgattattcctatccgctgacctttggcgcgggcaccaaactggaactgaaaggcggcggcggctccggcggcggcggctccggcggcggcggctcccaggtgcagctgcagcagtccgatgcggaactggtgaaaccgggctcctccgtgaaaatttcctgcaaagcgtccggctatacctttaccgatcatgcgattcattgggtgaaacagaaaccggaacagggcctggaatggattggccatttttccccgggcaataccgatattaaatataatgataaatttaaaggcaaagcgaccctgaccgtggatcgttcctcctccaccgcgtatatgcagctgaattccctgacctccgaagattccgcggtgtatttttgcaaaacctccacctttttttttgattattggggccagggcaccaccctgaccgtgtcctccaccacgacgccagcgccgcgaccaccaacaccggcgcccaccatcgcgtcgcagcccctgtccctgcgcccagaggcgtgccggccagcggcggggggcgcagtgcacacgagggggctggacttcgcctgtgatatctacatctgggcgcccttggccgggacttgtggggtccttctcctgtcactggttatcaccctttactgcaaacggggcagaaagaaactcctgtatatattcaaacaaccatttatgagaccagtacaaactactcaagaggaagatggctgtagctgccgatttccagaagaagaagaaggaggatgtgaactgagagtgaagttcagcaggagcgcagacgcccccgcgtacaagcagggccagaaccagctctataacgagctcaatctaggacgaagagaggagtacgatgttttggacaagaggcgtggccgggaccctgagatggggggaaagccgagaaggaagaaccctcaggaaggcctgtacaatgaactgcagaaagataagatggcggaggcctacagtgagattgggatgaaaggcgagcgccggaggggcaaggggcacgatggcctttaccagggtctcagtacagccaccaaggacacctacgacgcccttcacatgcaggccctgccccctcgctaatctagaggcgcgcccctctccctcccccccccctaacgttactggccgaagccgcttggaataaggccggtgtgcgtttgtctatatgttattttccaccatattgccgtcttttggcaatgtgagggcccggaaacctggccctgtcttcttgacgagcattcctaggggtctttcccctctcgccaaaggaatgcaaggtctgttgaatgtcgtgaaggaagcagttcctctggaagcttcttgaagacaaacaacgtctgtagcgaccctttgcaggcagcggaaccccccacctggcgacaggtgcctctgcggccaaaagccacgtgtataagatacacctgcaaaggcggcacaaccccagtgccacgttgtgagttggatagttgtggaaagagtcaaatggctctcctcaagcgtattcaacaaggggctgaaggatgcccagaaggtaccccattgtatgggatctgatctggggcctcggtacacatgctttacatgtgtttagtcgaggttaaaaaaacgtctaggccccccgaaccacggggacgtggttttcctttgaaaaacacgatgataatatggccacaacccatatgatggccttaccagtgaccgccttgctcctgccgctggccttgctgctccacgccgccaggccggacatccagatgacacagactacatcctccctgtctgcctctctgggagacagagtcaccatcagttgcagggcaagtcaggacattagtaaatatttaaattggtatcagcagaaaccagatggaactgttaaactcctgatctaccatacatcaagattacactcaggagtcccatcaaggttcagtggcagtgggtctggaacagattattctctcaccattagcaacctggagcaagaagatattgccacttacttttgccaacagggtaatacgcttccgtacacgttcggaggggggaccaagctggagatcacaggtggcggtggctcgggcggtggtgggtcgggtggcggcggatctgaggtgaaactgcaggagtcaggacctggcctggtggcgccctcacagagcctgtccgtcacatgcactgtctcaggggtctcattacccgactatggtgtaagctggattcgccagcctccacgaaagggtctggagtggctgggagtaatatggggtagtgaaaccacatactataattcagctctcaaatccagactgaccatcatcaaggacaactccaagagccaagttttcttaaaaatgaacagtctgcaaactgatgacacagccatttactactgtgccaaacattattactacggtggtagctatgctatggactactggggccaaggaacctcagtcaccgtctcctcaaccacgacgccagcgccgcgaccaccaacaccggcgcccaccatcgcgtcgcagcccctgtccctgcgcccagaggcgtgccggccagcggcggggggcgcagtgcacacgagggggctggacttcgcctgtgatatctacatctgggcgcccttggccgggacttgtggggtccttctcctgtcactggttatcaccaaacggggcagaaagaaactcctgtatatattcaaacaaccatttatgagaccagtacaaactactcaagaggaagatggctgtagctgccgatttccagaagaagaagaaggaggatgtgaactgagagtgaagttcagcaggagcgcagacgcccccgcgtacaagcagggccagaaccagctctataacgagctcaatctaggacgaagagaggagtacgatgttttggacaagaggcgtggccgggaccctgagatggggggaaagccgagaaggaagaaccctcaggaaggcctgtacaatgaactgcagaaagataagatggcggaggcctacagtgagattgggatgaaaggcgagcgccggaggggcaaggggcacgatggcctttaccagggtctcagtacagccaccaaggacacctacgacgcccttcacatgcaggccctgccccctcgctaa

SEQ ID NO: 207 - protein, 483 aa, Artificial Sequence
  Synthesized
MALPVTALLLPLALLLHAARPDIQMTQTTSSLSASLGDRVTISCRASQDISKYLNWYQQKPDGTVKLLIYHTSRLHSGVPSRFSGSGSGTDYSLTISNLEQEDIATYFCQQGNTLPYTFGGGTKLEITGGGGSGGGGSGGGGSEVKLQESGPGLVAPSQSLSVTCTVSGVSLPDYGVSWIRQPPRKGLEWLGVIWGSETTYYNSALKSRLTIIKDNSKSQVFLKMNSLQTDDTAIYYCAKHYYYGGSYAMDYWGQGTSVTVSSTTTPAPRPPTPAPTIASQPLSLRPEACRPAAGGAVHTRGLDFACDIYIWAPLAGTCGVLLLSLVITKRGRKKLLYIFKQPFMRPVQTTQEEDGCSCRFPEEEEGGCELRVKFSRSADAPAYQQGQNQLYNELNLGRREEYDVLDKRRGRDPEMGGKPRRKNPQEGLYNELQKDKMAEAYSEIGMKGERRRGKGHDGLYQGLSTATKDTYDALHMQALPPR

SEQ ID NO: 208 - DNA, 3515 bp, Artificial Sequence
  Synthesized
atggccttaccagtgaccgccttgctcctgccgctggccttgctgctccacgccgccaggccggatattgtgatgacccagtccccgtcctccctgaccgtgaccgcgggcgaaaaagtgaccatgatttgcaaatcctcccagtccctgctgaattccggcgatcagaaaaattatctgacctggtatcagcagaaaccgggccagccgccgaaactgctgattttttgggcgtccacccgtgaatccggcgtgccggatcgttttaccggctccggctccggcaccgattttaccctgaccatttcctccgtgcaggcggaagatctggcggtgtattattgccagaatgattattcctatccgctgacctttggcgcgggcaccaaactggaactgaaaggcggcggcggctccggcggcggcggctccggcggcggcggctcccaggtgcagctgcagcagtccgatgcggaactggtgaaaccgggctcctccgtgaaaatttcctgcaaagcgtccggctatacctttaccgatcatgcgattcattgggtgaaacagaaaccggaacagggcctggaatggattggccatttttccccgggcaataccgatattaaatataatgataaatttaaaggcaaagcgaccctgaccgtggatcgttcctcctccaccgcgtatatgcagctgaattccctgacctccgaagattccgcggtgtatttttgcaaaacctccacctttttttttgattattggggccagggcaccaccctgaccgtgtcctccaccacgacgccagcgccgcgaccaccaacaccggcgcccaccatcgcgtcgcagcccctgtccctgcgcccagaggcgtgccggccagcggcggggggcgcagtgcacacgagggggctggacttcgcctgtgatatctacatctgggcgcccttggccgggacttgtggggtccttctcctgtcactggttatcaccaaacggggcagaaagaaactcctgtatatattcaaacaaccatttatgagaccagtacaaactactcaagaggaagatggctgtagctgccgatttccagaagaagaagaaggaggatgtgaactgagagtgaagttcagcaggagcgcagacgcccccgcgtacaagcagggccagaaccagctctataacgagctcaatctaggacgaagagaggagtacgatgttttggacaagaggcgtggccgggaccctgagatggggggaaagccgagaaggaagaaccctcaggaaggcctgtacaatgaactgcagaaagataagatggcggaggcctacagtgagattgggatgaaaggcgagcgccggaggggcaaggggcacgatggcctttaccagggtctcagtacagccaccaaggacacctacgacgcccttcacatgcaggccctgccccctcgctaatctagaggcgcgcccctctccctcccccccccctaacgttactggccgaagccgcttggaataaggccggtgtgcgtttgtctatatgttattttccaccatattgccgtcttttggcaatgtgagggcccggaaacctggccctgtcttcttgacgagcattcctaggggtctttcccctctcgccaaaggaatgcaaggtctgttgaatgtcgtgaaggaagcagttcctctggaagcttcttgaagacaaacaacgtctgtagcgaccctttgcaggcagcggaaccccccacctggcgacaggtgcctctgcggccaaaagccacgtgtataagatacacctgcaaaggcggcacaaccccagtgccacgttgtgagttggatagttgtggaaagagtcaaatggctctcctcaagcgtattcaacaaggggctgaaggatgcccagaaggtaccccattgtatgggatctgatctggggcctcggtacacatgctttacatgtgtttagtcgaggttaaaaaaacgtctaggccccccgaaccacggggacgtggttttcctttgaaaaacacgatgataatatggccacaacccatatgatggccttaccagtgaccgccttgctcctgccgctggccttgctgctccacgccgccaggccggacatccagatgacacagactacatcctccctgtctgcctctctgggagacagagtcaccatcagttgcagggcaagtcaggacattagtaaatatttaaattggtatcagcagaaaccagatggaactgttaaactcctgatctaccatacatcaagattacactcaggagtcccatcaaggttcagtggcagtgggtctggaacagattattctctcaccattagcaacctggagcaagaagatattgccacttacttttgccaacagggtaatacgcttccgtacacgttcggaggggggaccaagctggagatcacaggtggcggtggctcgggcggtggtgggtcgggtggcggcggatctgaggtgaaactgcaggagtcaggacctggcctggtggcgccctcacagagcctgtccgtcacatgcactgtctcaggggtctcattacccgactatggtgtaagctggattcgccagcctccacgaaagggtctggagtggctgggagtaatatggggtagtgaaaccacatactataattcagctctcaaatccagactgaccatcatcaaggacaactccaagagccaagttttcttaaaaatgaacagtctgcaaactgatgacacagccatttactactgtgccaaacattattactacggtggtagctatgctatggactactggggccaaggaacctcagtcaccgtctcctcaaccacgacgccagcgccgcgaccaccaacaccggcgcccaccatcgcgtcgcagcccctgtccctgcgcccagaggcgtgccggccagcggcggggggcgcagtgcacacgagggggctggacttcgcctgtgatatctacatctgggcgcccttggccgggacttgtggggtccttctcctgtcactggttatcaccaaacggggcagaaagaaactcctgtatatattcaaacaaccatttatgagaccagtacaaactactcaagaggaagatggctgtagctgccgatttccagaagaagaagaaggaggatgtgaactgagagtgaagttcagcaggagcgcagacgcccccgcgtacaagcagggccagaaccagctctataacgagctcaatctaggacgaagagaggagtacgatgttttggacaagaggcgtggccgggaccctgagatggggggaaagccgagaaggaagaaccctcaggaaggcctgtacaatgaactgcagaaagataagatggcggaggcctacagtgagattgggatgaaaggcgagcgccggaggggcaaggggcacgatggcctttaccagggtctcagtacagccaccaaggacacctacgacgcccttcacatgcaggccctgccccctcgctaa

SEQ ID NO: 209 - DNA, 3533 bp, Artificial Sequence
  Synthesized
atggccttaccagtgaccgccttgctcctgccgctggccttgctgctccacgccgccaggccggacatcgtgatgacccagtccccctccagcctgacagtgacagccggcgagaaggtgacaatgatctgtaagtccagccagagcctgctgaacagcggcgaccagaagaactacctgacctggtaccagcagaagcctggccagccccccaagctgctgatcttctgggccagcacaagggagagcggcgtgcccgacagattcacaggcagcggcagcggcaccgacttcacactgaccatttcctccgtgcaggccgaggacctcgccgtgtactactgccagaacgactactcctaccccctgacattcggcgccggcaccaaactggagctgaagggtggcggtggctcgggcggtggtgggtcgggtggcggcggatctcaggtgcagctccagcagtccgatgccgagctggtgaagcccggaagcagcgtcaagatcagctgtaaggcctccggctacaccttcacagaccacgccatccactgggtgaagcagaagcccgagcagggcctggagtggatcggccactttagccccggaaacaccgacatcaagtacaacgacaagttcaagggcaaggccaccctgaccgtggacaggagcagcagcaccgcctacatgcagctgaacagcctgacaagcgaggacagcgccgtgtacttctgcaagacctccaccttcttcttcgactactggggccagggaaccaccctgacagtgtccagcaccacgacgccagcgccgcgaccaccaacaccggcgcccaccatcgcgtcgcagcccctgtccctgcgcccagaggcgtgccggccagcggcggggggcgcagtgcacacgagggggctggacttcgcctgtgatatctacatctgggcgcccttggccgggacttgtggggtccttctcctgtcactggttatcaccctttactgcaaacggggcagaaagaaactcctgtatatattcaaacaaccatttatgagaccagtacaaactactcaagaggaagatggctgtagctgccgatttccagaagaagaagaaggaggatgtgaactgagagtgaagttcagcaggagcgcagacgcccccgcgtacaagcagggccagaaccagctctataacgagctcaatctaggacgaagagaggagtacgatgttttggacaagaggcgtggccgggaccctgagatggggggaaagccgagaaggaagaaccctcaggaaggcctgtacaatgaactgcagaaagataagatggcggaggcctacagtgagattgggatgaaaggcgagcgccggaggggcaaggggcacgatggcctttaccagggtctcagtacagccaccaaggacacctacgacgcccttcacatgcaggccctgccccctcgctaatctagaggcgcgcccctctccctcccccccccctaacgttactggccgaagccgcttggaataaggccggtgtgcgtttgtctatatgttattttccaccatattgccgtcttttggcaatgtgagggcccggaaacctggccctgtcttcttgacgagcattcctaggggtctttcccctctcgccaaaggaatgcaaggtctgttgaatgtcgtgaaggaagcagttcctctggaagcttcttgaagacaaacaacgtctgtagcgaccctttgcaggcagcggaaccccccacctggcgacaggtgcctctgcggccaaaagccacgtgtataagatacacctgcaaaggcggcacaaccccagtgccacgttgtgagttggatagttgtggaaagagtcaaatggctctcctcaagcgtattcaacaaggggctgaaggatgcccagaaggtaccccattgtatgggatctgatctggggcctcggtacacatgctttacatgtgtttagtcgaggttaaaaaaacgtctaggccccccgaaccacggggacgtggttttcctttgaaaaacacgatgataatatggccacaacccatatgatggccttaccagtgaccgccttgctcctgccgctggccttgctgctccacgccgccaggccggacatccagatgacacagactacatcctccctgtctgcctctctgggagacagagtcaccatcagttgcagggcaagtcaggacattagtaaatatttaaattggtatcagcagaaaccagatggaactgttaaactcctgatctaccatacatcaagattacactcaggagtcccatcaaggttcagtggcagtgggtctggaacagattattctctcaccattagcaacctggagcaagaagatattgccacttacttttgccaacagggtaatacgcttccgtacacgttcggaggggggaccaagctggagatcacaggtggcggtggctcgggcggtggtgggtcgggtggcggcggatctgaggtgaaactgcaggagtcaggacctggcctggtggcgccctcacagagcctgtccgtcacatgcactgtctcaggggtctcattacccgactatggtgtaagctggattcgccagcctccacgaaagggtctggagtggctgggagtaatatggggtagtgaaaccacatactataattcagctctcaaatccagactgaccatcatcaaggacaactccaagagccaagttttcttaaaaatgaacagtctgcaaactgatgacacagccatttactactgtgccaaacattattactacggtggtagctatgctatggactactggggccaaggaacctcagtcaccgtctcctcaaccacgacgccagcgccgcgaccaccaacaccggcgcccaccatcgcgtcgcagcccctgtccctgcgcccagaggcgtgccggccagcggcggggggcgcagtgcacacgagggggctggacttcgcctgtgatatctacatctgggcgcccttggccgggacttgtggggtccttctcctgtcactggttatcaccctttactgcaaacggggcagaaagaaactcctgtatatattcaaacaaccatttatgagaccagtacaaactactcaagaggaagatggctgtagctgccgatttccagaagaagaagaaggaggatgtgaactgagagtgaagttcagcaggagcgcagacgcccccgcgtacaagcagggccagaaccagctctataacgagctcaatctaggacgaagagaggagtacgatgttttggacaagaggcgtggccgggaccctgagatggggggaaagccgagaaggaagaaccctcaggaaggcctgtacaatgaactgcagaaagataagatggcggaggcctacagtgagattgggatgaaaggcgagcgccggaggggcaaggggcacgatggcctttaccagggtctcagtacagccaccaaggacacctacgacgcccttcacatgcaggccctgccccctcgctaa

SEQ ID NO: 210 - protein, 490 aa, Artificial Sequence
  Synthesized
MALPVTALLLPLALLLHAARPDIVMTQAAFSNPVTLGTSASISCRSSKSLLHSNGITYFFWYLQKPGLSPQLLIYQMSNLASGVPDRFSSSGSGTDFTLRISRVEAEDVGVYYCAQNLELPPTFGGGTKLEIKRAGGGGSGGGGSGGGGSEVKLVESGGGLVQPGGSMKLSCVASGFTFSNYWMNWVRQSPEKGLEWVAEIRLKSNNYTTHYAESVKGRFTISRDDSKSSVSLQMNNLRVEDTGIYYCTRHYYFDYWGQGTTLTVSSTTTPAPRPPTPAPTIASQPLSLRPEACRPAAGGAVHTRGLDFACDIYIWAPLAGTCGVLLLSLVITLYCKRGRKKLLYIFKQPFMRPVQTTQEEDGCSCRFPEEEEGGCELRVKFSRSADAPAYQQGQNQLYNELNLGRREEYDVLDKRRGRDPEMGGKPRRKNPQEGLYNELQKDKMAEAYSEIGMKGERRRGKGHDGLYQGLSTATKDTYDALHMQALPPR

SEQ ID NO: 211 - DNA, 3524 bp, Artificial Sequence
  Synthesized
atggccttaccagtgaccgccttgctcctgccgctggccttgctgctccacgccgccaggccggacatcgtgatgacccagtccccctccagcctgacagtgacagccggcgagaaggtgacaatgatctgtaagtccagccagagcctgctgaacagcggcgaccagaagaactacctgacctggtaccagcagaagcctggccagccccccaagctgctgatcttctgggccagcacaagggagagcggcgtgcccgacagattcacaggcagcggcagcggcaccgacttcacactgaccatttcctccgtgcaggccgaggacctcgccgtgtactactgccagaacgactactcctaccccctgacattcggcgccggcaccaaactggagctgaagggtggcggtggctcgggcggtggtgggtcgggtggcggcggatctcaggtgcagctccagcagtccgatgccgagctggtgaagcccggaagcagcgtcaagatcagctgtaaggcctccggctacaccttcacagaccacgccatccactgggtgaagcagaagcccgagcagggcctggagtggatcggccactttagccccggaaacaccgacatcaagtacaacgacaagttcaagggcaaggccaccctgaccgtggacaggagcagcagcaccgcctacatgcagctgaacagcctgacaagcgaggacagcgccgtgtacttctgcaagacctccaccttcttcttcgactactggggccagggaaccaccctgacagtgtccagcaccacgacgccagcgccgcgaccaccaacaccggcgcccaccatcgcgtcgcagcccctgtccctgcgcccagaggcgtgccggccagcggcggggggcgcagtgcacacgagggggctggacttcgcctgtgatatctacatctgggcgcccttggccgggacttgtggggtccttctcctgtcactggttatcaccaaacggggcagaaagaaactcctgtatatattcaaacaaccatttatgagaccagtacaaactactcaagaggaagatggctgtagctgccgatttccagaagaagaagaaggaggatgtgaactgagagtgaagttcagcaggagcgcagacgcccccgcgtacaagcagggccagaaccagctctataacgagctcaatctaggacgaagagaggagtacgatgttttggacaagaggcgtggccgggaccctgagatggggggaaagccgagaaggaagaaccctcaggaaggcctgtacaatgaactgcagaaagataagatggcggaggcctacagtgagattgggatgaaaggcgagcgccggaggggcaaggggcacgatggcctttaccagggtctcagtacagccaccaaggacacctacgacgcccttcacatgcaggccctgccccctcgctaatctagaggcgcgcccctctccctcccccccccctaacgttactggccgaagccgcttggaataaggccggtgtgcgtttgtctatatgttattttccaccatattgccgtcttttggcaatgtgagggcccggaaacctggccctgtcttcttgacgagcattcctaggggtctttcccctctcgccaaaggaatgcaaggtctgttgaatgtcgtgaaggaagcagttcctctggaagcttcttgaagacaaacaacgtctgtagcgaccctttgcaggcagcggaaccccccacctggcgacaggtgcctctgcggccaaaagccacgtgtataagatacacctgcaaaggcggcacaaccccagtgccacgttgtgagttggatagttgtggaaagagtcaaatggctctcctcaagcgtattcaacaaggggctgaaggatgcccagaaggtaccccattgtatgggatctgatctggggcctcggtacacatgctttacatgtgtttagtcgaggttaaaaaaacgtctaggccccccgaaccacggggacgtggttttcctttgaaaaacacgatgataatatggccacaacccatatgatggccttaccagtgaccgccttgctcctgccgctggccttgctgctccacgccgccaggccggacatccagatgacacagactacatcctccctgtctgcctctctgggagacagagtcaccatcagttgcagggcaagtcaggacattagtaaatatttaaattggtatcagcagaaaccagatggaactgttaaactcctgatctaccatacatcaagattacactcaggagtcccatcaaggttcagtggcagtgggtctggaacagattattctctcaccattagcaacctggagcaagaagatattgccacttacttttgccaacagggtaatacgcttccgtacacgttcggaggggggaccaagctggagatcacaggtggcggtggctcgggcggtggtgggtcgggtggcggcggatctgaggtgaaactgcaggagtcaggacctggcctggtggcgccctcacagagcctgtccgtcacatgcactgtctcaggggtctcattacccgactatggtgtaagctggattcgccagcctccacgaaagggtctggagtggctgggagtaatatggggtagtgaaaccacatactataattcagctctcaaatccagactgaccatcatcaaggacaactccaagagccaagttttcttaaaaatgaacagtctgcaaactgatgacacagccatttactactgtgccaaacattattactacggtggtagctatgctatggactactggggccaaggaacctcagtcaccgtctcctcaaccacgacgccagcgccgcgaccaccaacaccggcgcccaccatcgcgtcgcagcccctgtccctgcgcccagaggcgtgccggccagcggcggggggcgcagtgcacacgagggggctggacttcgcctgtgatatctacatctgggcgcccttggccgggacttgtggggtccttctcctgtcactggttatcaccctttactgcaaacggggcagaaagaaactcctgtatatattcaaacaaccatttatgagaccagtacaaactactcaagaggaagatggctgtagctgccgatttccagaagaagaagaaggaggatgtgaactgagagtgaagttcagcaggagcgcagacgcccccgcgtacaagcagggccagaaccagctctataacgagctcaatctaggacgaagagaggagtacgatgttttggacaagaggcgtggccgggaccctgagatggggggaaagccgagaaggaagaaccctcaggaaggcctgtacaatgaactgcagaaagataagatggcggaggcctacagtgagattgggatgaaaggcgagcgccggaggggcaaggggcacgatggcctttaccagggtctcagtacagccaccaaggacacctacgacgcccttcacatgcaggccctgccccctcgctaa

SEQ ID NO: 212 - protein, 487 aa, Artificial Sequence
  Synthesized
MALPVTALLLPLALLLHAARPDIVMTQAAFSNPVTLGTSASISCRSSKSLLHSNGITYFFWYLQKPGLSPQLLIYQMSNLASGVPDRFSSSGSGTDFTLRISRVEAEDVGVYYCAQNLELPPTFGGGTKLEIKRAGGGGSGGGGSGGGGSEVKLVESGGGLVQPGGSMKLSCVASGFTFSNYWMNWVRQSPEKGLEWVAEIRLKSNNYTTHYAESVKGRFTISRDDSKSSVSLQMNNLRVEDTGIYYCTRHYYFDYWGQGTTLTVSSTTTPAPRPPTPAPTIASQPLSLRPEACRPAAGGAVHTRGLDFACDIYIWAPLAGTCGVLLLSLVITKRGRKKLLYIFKQPFMRPVQTTQEEDGCSCRFPEEEEGGCELRVKFSRSADAPAYQQGQNQLYNELNLGRREEYDVLDKRRGRDPEMGGKPRRKNPQEGLYNELQKDKMAEAYSEIGMKGERRRGKGHDGLYQGLSTATKDTYDALHMQALPPR

SEQ ID NO: 213 - DNA, 3524 bp, Artificial Sequence
  Synthesized
atggccttaccagtgaccgccttgctcctgccgctggccttgctgctccacgccgccaggccggacatcgtgatgacccagtccccctccagcctgacagtgacagccggcgagaaggtgacaatgatctgtaagtccagccagagcctgctgaacagcggcgaccagaagaactacctgacctggtaccagcagaagcctggccagccccccaagctgctgatcttctgggccagcacaagggagagcggcgtgcccgacagattcacaggcagcggcagcggcaccgacttcacactgaccatttcctccgtgcaggccgaggacctcgccgtgtactactgccagaacgactactcctaccccctgacattcggcgccggcaccaaactggagctgaagggtggcggtggctcgggcggtggtgggtcgggtggcggcggatctcaggtgcagctccagcagtccgatgccgagctggtgaagcccggaagcagcgtcaagatcagctgtaaggcctccggctacaccttcacagaccacgccatccactgggtgaagcagaagcccgagcagggcctggagtggatcggccactttagccccggaaacaccgacatcaagtacaacgacaagttcaagggcaaggccaccctgaccgtggacaggagcagcagcaccgcctacatgcagctgaacagcctgacaagcgaggacagcgccgtgtacttctgcaagacctccaccttcttcttcgactactggggccagggaaccaccctgacagtgtccagcaccacgacgccagcgccgcgaccaccaacaccggcgcccaccatcgcgtcgcagcccctgtccctgcgcccagaggcgtgccggccagcggcggggggcgcagtgcacacgagggggctggacttcgcctgtgatatctacatctgggcgcccttggccgggacttgtggggtccttctcctgtcactggttatcaccctttactgcaaacggggcagaaagaaactcctgtatatattcaaacaaccatttatgagaccagtacaaactactcaagaggaagatggctgtagctgccgatttccagaagaagaagaaggaggatgtgaactgagagtgaagttcagcaggagcgcagacgcccccgcgtacaagcagggccagaaccagctctataacgagctcaatctaggacgaagagaggagtacgatgttttggacaagaggcgtggccgggaccctgagatggggggaaagccgagaaggaagaaccctcaggaaggcctgtacaatgaactgcagaaagataagatggcggaggcctacagtgagattgggatgaaaggcgagcgccggaggggcaaggggcacgatggcctttaccagggtctcagtacagccaccaaggacacctacgacgcccttcacatgcaggccctgccccctcgctaatctagaggcgcgcccctctccctcccccccccctaacgttactggccgaagccgcttggaataaggccggtgtgcgtttgtctatatgttattttccaccatattgccgtcttttggcaatgtgagggcccggaaacctggccctgtcttcttgacgagcattcctaggggtctttcccctctcgccaaaggaatgcaaggtctgttgaatgtcgtgaaggaagcagttcctctggaagcttcttgaagacaaacaacgtctgtagcgaccctttgcaggcagcggaaccccccacctggcgacaggtgcctctgcggccaaaagccacgtgtataagatacacctgcaaaggcggcacaaccccagtgccacgttgtgagttggatagttgtggaaagagtcaaatggctctcctcaagcgtattcaacaaggggctgaaggatgcccagaaggtaccccattgtatgggatctgatctggggcctcggtacacatgctttacatgtgtttagtcgaggttaaaaaaacgtctaggccccccgaaccacggggacgtggttttcctttgaaaaacacgatgataatatggccacaacccatatgatggccttaccagtgaccgccttgctcctgccgctggccttgctgctccacgccgccaggccggacatccagatgacacagactacatcctccctgtctgcctctctgggagacagagtcaccatcagttgcagggcaagtcaggacattagtaaatatttaaattggtatcagcagaaaccagatggaactgttaaactcctgatctaccatacatcaagattacactcaggagtcccatcaaggttcagtggcagtgggtctggaacagattattctctcaccattagcaacctggagcaagaagatattgccacttacttttgccaacagggtaatacgcttccgtacacgttcggaggggggaccaagctggagatcacaggtggcggtggctcgggcggtggtgggtcgggtggcggcggatctgaggtgaaactgcaggagtcaggacctggcctggtggcgccctcacagagcctgtccgtcacatgcactgtctcaggggtctcattacccgactatggtgtaagctggattcgccagcctccacgaaagggtctggagtggctgggagtaatatggggtagtgaaaccacatactataattcagctctcaaatccagactgaccatcatcaaggacaactccaagagccaagttttcttaaaaatgaacagtctgcaaactgatgacacagccatttactactgtgccaaacattattactacggtggtagctatgctatggactactggggccaaggaacctcagtcaccgtctcctcaaccacgacgccagcgccgcgaccaccaacaccggcgcccaccatcgcgtcgcagcccctgtccctgcgcccagaggcgtgccggccagcggcggggggcgcagtgcacacgagggggctggacttcgcctgtgatatctacatctgggcgcccttggccgggacttgtggggtccttctcctgtcactggttatcaccaaacggggcagaaagaaactcctgtatatattcaaacaaccatttatgagaccagtacaaactactcaagaggaagatggctgtagctgccgatttccagaagaagaagaaggaggatgtgaactgagagtgaagttcagcaggagcgcagacgcccccgcgtacaagcagggccagaaccagctctataacgagctcaatctaggacgaagagaggagtacgatgttttggacaagaggcgtggccgggaccctgagatggggggaaagccgagaaggaagaaccctcaggaaggcctgtacaatgaactgcagaaagataagatggcggaggcctacagtgagattgggatgaaaggcgagcgccggaggggcaaggggcacgatggcctttaccagggtctcagtacagccaccaaggacacctacgacgcccttcacatgcaggccctgccccctcgctaa

SEQ ID NO: 214 - DNA, 3515 bp, Artificial Sequence
  Synthesized
atggccttaccagtgaccgccttgctcctgccgctggccttgctgctccacgccgccaggccggacatcgtgatgacccagtccccctccagcctgacagtgacagccggcgagaaggtgacaatgatctgtaagtccagccagagcctgctgaacagcggcgaccagaagaactacctgacctggtaccagcagaagcctggccagccccccaagctgctgatcttctgggccagcacaagggagagcggcgtgcccgacagattcacaggcagcggcagcggcaccgacttcacactgaccatttcctccgtgcaggccgaggacctcgccgtgtactactgccagaacgactactcctaccccctgacattcggcgccggcaccaaactggagctgaagggtggcggtggctcgggcggtggtgggtcgggtggcggcggatctcaggtgcagctccagcagtccgatgccgagctggtgaagcccggaagcagcgtcaagatcagctgtaaggcctccggctacaccttcacagaccacgccatccactgggtgaagcagaagcccgagcagggcctggagtggatcggccactttagccccggaaacaccgacatcaagtacaacgacaagttcaagggcaaggccaccctgaccgtggacaggagcagcagcaccgcctacatgcagctgaacagcctgacaagcgaggacagcgccgtgtacttctgcaagacctccaccttcttcttcgactactggggccagggaaccaccctgacagtgtccagcaccacgacgccagcgccgcgaccaccaacaccggcgcccaccatcgcgtcgcagcccctgtccctgcgcccagaggcgtgccggccagcggcggggggcgcagtgcacacgagggggctggacttcgcctgtgatatctacatctgggcgcccttggccgggacttgtggggtccttctcctgtcactggttatcaccaaacggggcagaaagaaactcctgtatatattcaaacaaccatttatgagaccagtacaaactactcaagaggaagatggctgtagctgccgatttccagaagaagaagaaggaggatgtgaactgagagtgaagttcagcaggagcgcagacgcccccgcgtacaagcagggccagaaccagctctataacgagctcaatctaggacgaagagaggagtacgatgttttggacaagaggcgtggccgggaccctgagatggggggaaagccgagaaggaagaaccctcaggaaggcctgtacaatgaactgcagaaagataagatggcggaggcctacagtgagattgggatgaaaggcgagcgccggaggggcaaggggcacgatggcctttaccagggtctcagtacagccaccaaggacacctacgacgcccttcacatgcaggccctgccccctcgctaatctagaggcgcgcccctctccctcccccccccctaacgttactggccgaagccgcttggaataaggccggtgtgcgtttgtctatatgttattttccaccatattgccgtcttttggcaatgtgagggcccggaaacctggccctgtcttcttgacgagcattcctaggggtctttcccctctcgccaaaggaatgcaaggtctgttgaatgtcgtgaaggaagcagttcctctggaagcttcttgaagacaaacaacgtctgtagcgaccctttgcaggcagcggaaccccccacctggcgacaggtgcctctgcggccaaaagccacgtgtataagatacacctgcaaaggcggcacaaccccagtgccacgttgtgagttggatagttgtggaaagagtcaaatggctctcctcaagcgtattcaacaaggggctgaaggatgcccagaaggtaccccattgtatgggatctgatctggggcctcggtacacatgctttacatgtgtttagtcgaggttaaaaaaacgtctaggccccccgaaccacggggacgtggttttcctttgaaaaacacgatgataatatggccacaacccatatgatggccttaccagtgaccgccttgctcctgccgctggccttgctgctccacgccgccaggccggacatccagatgacacagactacatcctccctgtctgcctctctgggagacagagtcaccatcagttgcagggcaagtcaggacattagtaaatatttaaattggtatcagcagaaaccagatggaactgttaaactcctgatctaccatacatcaagattacactcaggagtcccatcaaggttcagtggcagtgggtctggaacagattattctctcaccattagcaacctggagcaagaagatattgccacttacttttgccaacagggtaatacgcttccgtacacgttcggaggggggaccaagctggagatcacaggtggcggtggctcgggcggtggtgggtcgggtggcggcggatctgaggtgaaactgcaggagtcaggacctggcctggtggcgccctcacagagcctgtccgtcacatgcactgtctcaggggtctcattacccgactatggtgtaagctggattcgccagcctccacgaaagggtctggagtggctgggagtaatatggggtagtgaaaccacatactataattcagctctcaaatccagactgaccatcatcaaggacaactccaagagccaagttttcttaaaaatgaacagtctgcaaactgatgacacagccatttactactgtgccaaacattattactacggtggtagctatgctatggactactggggccaaggaacctcagtcaccgtctcctcaaccacgacgccagcgccgcgaccaccaacaccggcgcccaccatcgcgtcgcagcccctgtccctgcgcccagaggcgtgccggccagcggcggggggcgcagtgcacacgagggggctggacttcgcctgtgatatctacatctgggcgcccttggccgggacttgtggggtccttctcctgtcactggttatcaccaaacggggcagaaagaaactcctgtatatattcaaacaaccatttatgagaccagtacaaactactcaagaggaagatggctgtagctgccgatttccagaagaagaagaaggaggatgtgaactgagagtgaagttcagcaggagcgcagacgcccccgcgtacaagcagggccagaaccagctctataacgagctcaatctaggacgaagagaggagtacgatgttttggacaagaggcgtggccgggaccctgagatggggggaaagccgagaaggaagaaccctcaggaaggcctgtacaatgaactgcagaaagataagatggcggaggcctacagtgagattgggatgaaaggcgagcgccggaggggcaaggggcacgatggcctttaccagggtctcagtacagccaccaaggacacctacgacgcccttcacatgcaggccctgccccctcgctaa

SEQ ID NO: 215 - DNA, 3533 bp, Artificial Sequence
  Synthesized
atggccttaccagtgaccgccttgctcctgccgctggccttgctgctccacgccgccaggccggatattgtgatgacccagtccccgtcctccctgaccgtgaccgcgggcgaaaaagtgaccatgatttgcaaatcctcccagtccctgctgaattccggcgatcagaaaaattatctgacctggtatcagcagaaaccgggccagccgccgaaactgctgattttttgggcgtccacccgtgaatccggcgtgccggatcgttttaccggctccggctccggcaccgattttaccctgaccatttcctccgtgcaggcggaagatctggcggtgtattattgccagaatgattattcctatccgctgacctttggcgcgggcaccaaactggaactgaaaggcggcggcggctccggcggcggcggctccggcggcggcggctcccaggtgcagctgcagcagtccgatgcggaactggtgaaaccgggctcctccgtgaaaatttcctgcaaagcgtccggctatacctttaccgatcatgcgattcattgggtgaaacagaaaccggaacagggcctggaatggattggccatttttccccgggcaataccgatattaaatataatgataaatttaaaggcaaagcgaccctgaccgtggatcgttcctcctccaccgcgtatatgcagctgaattccctgacctccgaagattccgcggtgtatttttgcaaaacctccacctttttttttgattattggggccagggcaccaccctgaccgtgtcctccaccacgacgccagcgccgcgaccaccaacaccggcgcccaccatcgcgtcgcagcccctgtccctgcgcccagaggcgtgccggccagcggcggggggcgcagtgcacacgagggggctggacttcgcctgtgatatctacatctgggcgcccttggccgggacttgtggggtccttctcctgtcactggttatcaccctttactgcaaacggggcagaaagaaactcctgtatatattcaaacaaccatttatgagaccagtacaaactactcaagaggaagatggctgtagctgccgatttccagaagaagaagaaggaggatgtgaactgagagtgaagttcagcaggagcgcagacgcccccgcgtacaagcagggccagaaccagctctataacgagctcaatctaggacgaagagaggagtacgatgttttggacaagaggcgtggccgggaccctgagatggggggaaagccgagaaggaagaaccctcaggaaggcctgtacaatgaactgcagaaagataagatggcggaggcctacagtgagattgggatgaaaggcgagcgccggaggggcaaggggcacgatggcctttaccagggtctcagtacagccaccaaggacacctacgacgcccttcacatgcaggccctgccccctcgctaatctagaggcgcgcccctctccctcccccccccctaacgttactggccgaagccgcttggaataaggccggtgtgcgtttgtctatatgttattttccaccatattgccgtcttttggcaatgtgagggcccggaaacctggccctgtcttcttgacgagcattcctaggggtctttcccctctcgccaaaggaatgcaaggtctgttgaatgtcgtgaaggaagcagttcctctggaagcttcttgaagacaaacaacgtctgtagcgaccctttgcaggcagcggaaccccccacctggcgacaggtgcctctgcggccaaaagccacgtgtataagatacacctgcaaaggcggcacaaccccagtgccacgttgtgagttggatagttgtggaaagagtcaaatggctctcctcaagcgtattcaacaaggggctgaaggatgcccagaaggtaccccattgtatgggatctgatctggggcctcggtacacatgctttacatgtgtttagtcgaggttaaaaaaacgtctaggccccccgaaccacggggacgtggttttcctttgaaaaacacgatgataatatggccacaacccatatgatggccttaccagtgaccgccttgctcctgccgctggccttgctgctccacgccgccaggccggatatccagatgacccagagcccgagcagcctgagcgcgagcgtgggtgatcgcgtgaccattacctgcagggcaagtcaggacattagtaaatatttaaattggtatcagcagaaaccgggtaaagcgccgaaactgttaatttatcatacatcaagattacactcaggcgtgccgtcgcgttttagcggctcgggttcgggcaccgattttaccctgaccatctcgagcttgcagccggaggacttcgccacctactattgccaacagggtaatacgcttccgtacacgttcggtcagggcaccaaagtggagatcaaaggtggcggtggctcgggcggtggtgggtcgggtggcggcggatctgaggtgcagctggtggagtctgggggaggcttggtacagcctggggggtccctgagactctcctgtgcagcctctggagtgtccctgcctgattatggcgtgtcctgggtccgccaggctccagggaaggggctggagtgggtttcagtgatctggggcagcgagacaacctactacaacagcgccctgaagtcccgattcaccatctccagagacaatgccaagaactcactgtatctgcaaatgaacagcctgagagccgaggacacggctgtgtattactgtgcgaagcactactactacggcggcagctacgctatggactactggggccaaggaaccctggtcaccgtgtcctcaaccacgacgccagcgccgcgaccaccaacaccggcgcccaccatcgcgtcgcagcccctgtccctgcgcccagaggcgtgccggccagcggcggggggcgcagtgcacacgagggggctggacttcgcctgtgatatctacatctgggcgcccttggccgggacttgtggggtccttctcctgtcactggttatcaccctttactgcaaacggggcagaaagaaactcctgtatatattcaaacaaccatttatgagaccagtacaaactactcaagaggaagatggctgtagctgccgatttccagaagaagaagaaggaggatgtgaactgagagtgaagttcagcaggagcgcagacgcccccgcgtacaagcagggccagaaccagctctataacgagctcaatctaggacgaagagaggagtacgatgttttggacaagaggcgtggccgggaccctgagatggggggaaagccgagaaggaagaaccctcaggaaggcctgtacaatgaactgcagaaagataagatggcggaggcctacagtgagattgggatgaaaggcgagcgccggaggggcaaggggcacgatggcctttaccagggtctcagtacagccaccaaggacacctacgacgcccttcacatgcaggccctgccccctcgctaa

SEQ ID NO: 216 - protein, 486 aa, Artificial Sequence
  Synthesized
MALPVTALLLPLALLLHAARPDIQMTQSPSSLSASVGDRVTITCRASQDISKYLNWYQQKPGKAPKLLIYHTSRLHSGVPSRFSGSGSGTDFTLTISSLQPEDFATYYCQQGNTLPYTFGQGTKVEIKGGGGSGGGGSGGGGSEVQLVESGGGLVQPGGSLRLSCAASGVSLPDYGVSWVRQAPGKGLEWVSVIWGSETTYYNSALKSRFTISRDNAKNSLYLQMNSLRAEDTAVYYCAKHYYYGGSYAMDYWGQGTLVTVSSTTTPAPRPPTPAPTIASQPLSLRPEACRPAAGGAVHTRGLDFACDIYIWAPLAGTCGVLLLSLVITLYCKRGRKKLLYIFKQPFMRPVQTTQEEDGCSCRFPEEEEGGCELRVKFSRSADAPAYQQGQNQLYNELNLGRREEYDVLDKRRGRDPEMGGKPRRKNPQEGLYNELQKDKMAEAYSEIGMKGERRRGKGHDGLYQGLSTATKDTYDALHMQALPPR

SEQ ID NO: 217 - DNA, 3524 bp, Artificial Sequence
  Synthesized
atggccttaccagtgaccgccttgctcctgccgctggccttgctgctccacgccgccaggccggatattgtgatgacccagtccccgtcctccctgaccgtgaccgcgggcgaaaaagtgaccatgatttgcaaatcctcccagtccctgctgaattccggcgatcagaaaaattatctgacctggtatcagcagaaaccgggccagccgccgaaactgctgattttttgggcgtccacccgtgaatccggcgtgccggatcgttttaccggctccggctccggcaccgattttaccctgaccatttcctccgtgcaggcggaagatctggcggtgtattattgccagaatgattattcctatccgctgacctttggcgcgggcaccaaactggaactgaaaggcggcggcggctccggcggcggcggctccggcggcggcggctcccaggtgcagctgcagcagtccgatgcggaactggtgaaaccgggctcctccgtgaaaatttcctgcaaagcgtccggctatacctttaccgatcatgcgattcattgggtgaaacagaaaccggaacagggcctggaatggattggccatttttccccgggcaataccgatattaaatataatgataaatttaaaggcaaagcgaccctgaccgtggatcgttcctcctccaccgcgtatatgcagctgaattccctgacctccgaagattccgcggtgtatttttgcaaaacctccacctttttttttgattattggggccagggcaccaccctgaccgtgtcctccaccacgacgccagcgccgcgaccaccaacaccggcgcccaccatcgcgtcgcagcccctgtccctgcgcccagaggcgtgccggccagcggcggggggcgcagtgcacacgagggggctggacttcgcctgtgatatctacatctgggcgcccttggccgggacttgtggggtccttctcctgtcactggttatcaccaaacggggcagaaagaaactcctgtatatattcaaacaaccatttatgagaccagtacaaactactcaagaggaagatggctgtagctgccgatttccagaagaagaagaaggaggatgtgaactgagagtgaagttcagcaggagcgcagacgcccccgcgtacaagcagggccagaaccagctctataacgagctcaatctaggacgaagagaggagtacgatgttttggacaagaggcgtggccgggaccctgagatggggggaaagccgagaaggaagaaccctcaggaaggcctgtacaatgaactgcagaaagataagatggcggaggcctacagtgagattgggatgaaaggcgagcgccggaggggcaaggggcacgatggcctttaccagggtctcagtacagccaccaaggacacctacgacgcccttcacatgcaggccctgccccctcgctaatctagaggcgcgcccctctccctcccccccccctaacgttactggccgaagccgcttggaataaggccggtgtgcgtttgtctatatgttattttccaccatattgccgtcttttggcaatgtgagggcccggaaacctggccctgtcttcttgacgagcattcctaggggtctttcccctctcgccaaaggaatgcaaggtctgttgaatgtcgtgaaggaagcagttcctctggaagcttcttgaagacaaacaacgtctgtagcgaccctttgcaggcagcggaaccccccacctggcgacaggtgcctctgcggccaaaagccacgtgtataagatacacctgcaaaggcggcacaaccccagtgccacgttgtgagttggatagttgtggaaagagtcaaatggctctcctcaagcgtattcaacaaggggctgaaggatgcccagaaggtaccccattgtatgggatctgatctggggcctcggtacacatgctttacatgtgtttagtcgaggttaaaaaaacgtctaggccccccgaaccacggggacgtggttttcctttgaaaaacacgatgataatatggccacaacccatatgatggccttaccagtgaccgccttgctcctgccgctggccttgctgctccacgccgccaggccggatatccagatgacccagagcccgagcagcctgagcgcgagcgtgggtgatcgcgtgaccattacctgcagggcaagtcaggacattagtaaatatttaaattggtatcagcagaaaccgggtaaagcgccgaaactgttaatttatcatacatcaagattacactcaggcgtgccgtcgcgttttagcggctcgggttcgggcaccgattttaccctgaccatctcgagcttgcagccggaggacttcgccacctactattgccaacagggtaatacgcttccgtacacgttcggtcagggcaccaaagtggagatcaaaggtggcggtggctcgggcggtggtgggtcgggtggcggcggatctgaggtgcagctggtggagtctgggggaggcttggtacagcctggggggtccctgagactctcctgtgcagcctctggagtgtccctgcctgattatggcgtgtcctgggtccgccaggctccagggaaggggctggagtgggtttcagtgatctggggcagcgagacaacctactacaacagcgccctgaagtcccgattcaccatctccagagacaatgccaagaactcactgtatctgcaaatgaacagcctgagagccgaggacacggctgtgtattactgtgcgaagcactactactacggcggcagctacgctatggactactggggccaaggaaccctggtcaccgtgtcctcaaccacgacgccagcgccgcgaccaccaacaccggcgcccaccatcgcgtcgcagcccctgtccctgcgcccagaggcgtgccggccagcggcggggggcgcagtgcacacgagggggctggacttcgcctgtgatatctacatctgggcgcccttggccgggacttgtggggtccttctcctgtcactggttatcaccctttactgcaaacggggcagaaagaaactcctgtatatattcaaacaaccatttatgagaccagtacaaactactcaagaggaagatggctgtagctgccgatttccagaagaagaagaaggaggatgtgaactgagagtgaagttcagcaggagcgcagacgcccccgcgtacaagcagggccagaaccagctctataacgagctcaatctaggacgaagagaggagtacgatgttttggacaagaggcgtggccgggaccctgagatggggggaaagccgagaaggaagaaccctcaggaaggcctgtacaatgaactgcagaaagataagatggcggaggcctacagtgagattgggatgaaaggcgagcgccggaggggcaaggggcacgatggcctttaccagggtctcagtacagccaccaaggacacctacgacgcccttcacatgcaggccctgccccctcgctaa

SEQ ID NO: 218 - DNA, 3524 bp, Artificial Sequence
  Synthesized
atggccttaccagtgaccgccttgctcctgccgctggccttgctgctccacgccgccaggccggatattgtgatgacccagtccccgtcctccctgaccgtgaccgcgggcgaaaaagtgaccatgatttgcaaatcctcccagtccctgctgaattccggcgatcagaaaaattatctgacctggtatcagcagaaaccgggccagccgccgaaactgctgattttttgggcgtccacccgtgaatccggcgtgccggatcgttttaccggctccggctccggcaccgattttaccctgaccatttcctccgtgcaggcggaagatctggcggtgtattattgccagaatgattattcctatccgctgacctttggcgcgggcaccaaactggaactgaaaggcggcggcggctccggcggcggcggctccggcggcggcggctcccaggtgcagctgcagcagtccgatgcggaactggtgaaaccgggctcctccgtgaaaatttcctgcaaagcgtccggctatacctttaccgatcatgcgattcattgggtgaaacagaaaccggaacagggcctggaatggattggccatttttccccgggcaataccgatattaaatataatgataaatttaaaggcaaagcgaccctgaccgtggatcgttcctcctccaccgcgtatatgcagctgaattccctgacctccgaagattccgcggtgtatttttgcaaaacctccacctttttttttgattattggggccagggcaccaccctgaccgtgtcctccaccacgacgccagcgccgcgaccaccaacaccggcgcccaccatcgcgtcgcagcccctgtccctgcgcccagaggcgtgccggccagcggcggggggcgcagtgcacacgagggggctggacttcgcctgtgatatctacatctgggcgcccttggccgggacttgtggggtccttctcctgtcactggttatcaccctttactgcaaacggggcagaaagaaactcctgtatatattcaaacaaccatttatgagaccagtacaaactactcaagaggaagatggctgtagctgccgatttccagaagaagaagaaggaggatgtgaactgagagtgaagttcagcaggagcgcagacgcccccgcgtacaagcagggccagaaccagctctataacgagctcaatctaggacgaagagaggagtacgatgttttggacaagaggcgtggccgggaccctgagatggggggaaagccgagaaggaagaaccctcaggaaggcctgtacaatgaactgcagaaagataagatggcggaggcctacagtgagattgggatgaaaggcgagcgccggaggggcaaggggcacgatggcctttaccagggtctcagtacagccaccaaggacacctacgacgcccttcacatgcaggccctgccccctcgctaatctagaggcgcgcccctctccctcccccccccctaacgttactggccgaagccgcttggaataaggccggtgtgcgtttgtctatatgttattttccaccatattgccgtcttttggcaatgtgagggcccggaaacctggccctgtcttcttgacgagcattcctaggggtctttcccctctcgccaaaggaatgcaaggtctgttgaatgtcgtgaaggaagcagttcctctggaagcttcttgaagacaaacaacgtctgtagcgaccctttgcaggcagcggaaccccccacctggcgacaggtgcctctgcggccaaaagccacgtgtataagatacacctgcaaaggcggcacaaccccagtgccacgttgtgagttggatagttgtggaaagagtcaaatggctctcctcaagcgtattcaacaaggggctgaaggatgcccagaaggtaccccattgtatgggatctgatctggggcctcggtacacatgctttacatgtgtttagtcgaggttaaaaaaacgtctaggccccccgaaccacggggacgtggttttcctttgaaaaacacgatgataatatggccacaacccatatgatggccttaccagtgaccgccttgctcctgccgctggccttgctgctccacgccgccaggccggatatccagatgacccagagcccgagcagcctgagcgcgagcgtgggtgatcgcgtgaccattacctgcagggcaagtcaggacattagtaaatatttaaattggtatcagcagaaaccgggtaaagcgccgaaactgttaatttatcatacatcaagattacactcaggcgtgccgtcgcgttttagcggctcgggttcgggcaccgattttaccctgaccatctcgagcttgcagccggaggacttcgccacctactattgccaacagggtaatacgcttccgtacacgttcggtcagggcaccaaagtggagatcaaaggtggcggtggctcgggcggtggtgggtcgggtggcggcggatctgaggtgcagctggtggagtctgggggaggcttggtacagcctggggggtccctgagactctcctgtgcagcctctggagtgtccctgcctgattatggcgtgtcctgggtccgccaggctccagggaaggggctggagtgggtttcagtgatctggggcagcgagacaacctactacaacagcgccctgaagtcccgattcaccatctccagagacaatgccaagaactcactgtatctgcaaatgaacagcctgagagccgaggacacggctgtgtattactgtgcgaagcactactactacggcggcagctacgctatggactactggggccaaggaaccctggtcaccgtgtcctcaaccacgacgccagcgccgcgaccaccaacaccggcgcccaccatcgcgtcgcagcccctgtccctgcgcccagaggcgtgccggccagcggcggggggcgcagtgcacacgagggggctggacttcgcctgtgatatctacatctgggcgcccttggccgggacttgtggggtccttctcctgtcactggttatcaccaaacggggcagaaagaaactcctgtatatattcaaacaaccatttatgagaccagtacaaactactcaagaggaagatggctgtagctgccgatttccagaagaagaagaaggaggatgtgaactgagagtgaagttcagcaggagcgcagacgcccccgcgtacaagcagggccagaaccagctctataacgagctcaatctaggacgaagagaggagtacgatgttttggacaagaggcgtggccgggaccctgagatggggggaaagccgagaaggaagaaccctcaggaaggcctgtacaatgaactgcagaaagataagatggcggaggcctacagtgagattgggatgaaaggcgagcgccggaggggcaaggggcacgatggcctttaccagggtctcagtacagccaccaaggacacctacgacgcccttcacatgcaggccctgccccctcgctaa

SEQ ID NO: 219 - protein, 483 aa, Artificial Sequence
  Synthesized
MALPVTALLLPLALLLHAARPDIQMTQSPSSLSASVGDRVTITCRASQDISKYLNWYQQKPGKAPKLLIYHTSRLHSGVPSRFSGSGSGTDFTLTISSLQPEDFATYYCQQGNTLPYTFGQGTKVEIKGGGGSGGGGSGGGGSEVQLVESGGGLVQPGGSLRLSCAASGVSLPDYGVSWVRQAPGKGLEWVSVIWGSETTYYNSALKSRFTISRDNAKNSLYLQMNSLRAEDTAVYYCAKHYYYGGSYAMDYWGQGTLVTVSSTTTPAPRPPTPAPTIASQPLSLRPEACRPAAGGAVHTRGLDFACDIYIWAPLAGTCGVLLLSLVITKRGRKKLLYIFKQPFMRPVQTTQEEDGCSCRFPEEEEGGCELRVKFSRSADAPAYQQGQNQLYNELNLGRREEYDVLDKRRGRDPEMGGKPRRKNPQEGLYNELQKDKMAEAYSEIGMKGERRRGKGHDGLYQGLSTATKDTYDALHMQALPPR

SEQ ID NO: 220 - DNA, 3515 bp, Artificial Sequence
  Synthesized
atggccttaccagtgaccgccttgctcctgccgctggccttgctgctccacgccgccaggccggatattgtgatgacccagtccccgtcctccctgaccgtgaccgcgggcgaaaaagtgaccatgatttgcaaatcctcccagtccctgctgaattccggcgatcagaaaaattatctgacctggtatcagcagaaaccgggccagccgccgaaactgctgattttttgggcgtccacccgtgaatccggcgtgccggatcgttttaccggctccggctccggcaccgattttaccctgaccatttcctccgtgcaggcggaagatctggcggtgtattattgccagaatgattattcctatccgctgacctttggcgcgggcaccaaactggaactgaaaggcggcggcggctccggcggcggcggctccggcggcggcggctcccaggtgcagctgcagcagtccgatgcggaactggtgaaaccgggctcctccgtgaaaatttcctgcaaagcgtccggctatacctttaccgatcatgcgattcattgggtgaaacagaaaccggaacagggcctggaatggattggccatttttccccgggcaataccgatattaaatataatgataaatttaaaggcaaagcgaccctgaccgtggatcgttcctcctccaccgcgtatatgcagctgaattccctgacctccgaagattccgcggtgtatttttgcaaaacctccacctttttttttgattattggggccagggcaccaccctgaccgtgtcctccaccacgacgccagcgccgcgaccaccaacaccggcgcccaccatcgcgtcgcagcccctgtccctgcgcccagaggcgtgccggccagcggcggggggcgcagtgcacacgagggggctggacttcgcctgtgatatctacatctgggcgcccttggccgggacttgtggggtccttctcctgtcactggttatcaccaaacggggcagaaagaaactcctgtatatattcaaacaaccatttatgagaccagtacaaactactcaagaggaagatggctgtagctgccgatttccagaagaagaagaaggaggatgtgaactgagagtgaagttcagcaggagcgcagacgcccccgcgtacaagcagggccagaaccagctctataacgagctcaatctaggacgaagagaggagtacgatgttttggacaagaggcgtggccgggaccctgagatggggggaaagccgagaaggaagaaccctcaggaaggcctgtacaatgaactgcagaaagataagatggcggaggcctacagtgagattgggatgaaaggcgagcgccggaggggcaaggggcacgatggcctttaccagggtctcagtacagccaccaaggacacctacgacgcccttcacatgcaggccctgccccctcgctaatctagaggcgcgcccctctccctcccccccccctaacgttactggccgaagccgcttggaataaggccggtgtgcgtttgtctatatgttattttccaccatattgccgtcttttggcaatgtgagggcccggaaacctggccctgtcttcttgacgagcattcctaggggtctttcccctctcgccaaaggaatgcaaggtctgttgaatgtcgtgaaggaagcagttcctctggaagcttcttgaagacaaacaacgtctgtagcgaccctttgcaggcagcggaaccccccacctggcgacaggtgcctctgcggccaaaagccacgtgtataagatacacctgcaaaggcggcacaaccccagtgccacgttgtgagttggatagttgtggaaagagtcaaatggctctcctcaagcgtattcaacaaggggctgaaggatgcccagaaggtaccccattgtatgggatctgatctggggcctcggtacacatgctttacatgtgtttagtcgaggttaaaaaaacgtctaggccccccgaaccacggggacgtggttttcctttgaaaaacacgatgataatatggccacaacccatatgatggccttaccagtgaccgccttgctcctgccgctggccttgctgctccacgccgccaggccggatatccagatgacccagagcccgagcagcctgagcgcgagcgtgggtgatcgcgtgaccattacctgcagggcaagtcaggacattagtaaatatttaaattggtatcagcagaaaccgggtaaagcgccgaaactgttaatttatcatacatcaagattacactcaggcgtgccgtcgcgttttagcggctcgggttcgggcaccgattttaccctgaccatctcgagcttgcagccggaggacttcgccacctactattgccaacagggtaatacgcttccgtacacgttcggtcagggcaccaaagtggagatcaaaggtggcggtggctcgggcggtggtgggtcgggtggcggcggatctgaggtgcagctggtggagtctgggggaggcttggtacagcctggggggtccctgagactctcctgtgcagcctctggagtgtccctgcctgattatggcgtgtcctgggtccgccaggctccagggaaggggctggagtgggtttcagtgatctggggcagcgagacaacctactacaacagcgccctgaagtcccgattcaccatctccagagacaatgccaagaactcactgtatctgcaaatgaacagcctgagagccgaggacacggctgtgtattactgtgcgaagcactactactacggcggcagctacgctatggactactggggccaaggaaccctggtcaccgtgtcctcaaccacgacgccagcgccgcgaccaccaacaccggcgcccaccatcgcgtcgcagcccctgtccctgcgcccagaggcgtgccggccagcggcggggggcgcagtgcacacgagggggctggacttcgcctgtgatatctacatctgggcgcccttggccgggacttgtggggtccttctcctgtcactggttatcaccaaacggggcagaaagaaactcctgtatatattcaaacaaccatttatgagaccagtacaaactactcaagaggaagatggctgtagctgccgatttccagaagaagaagaaggaggatgtgaactgagagtgaagttcagcaggagcgcagacgcccccgcgtacaagcagggccagaaccagctctataacgagctcaatctaggacgaagagaggagtacgatgttttggacaagaggcgtggccgggaccctgagatggggggaaagccgagaaggaagaaccctcaggaaggcctgtacaatgaactgcagaaagataagatggcggaggcctacagtgagattgggatgaaaggcgagcgccggaggggcaaggggcacgatggcctttaccagggtctcagtacagccaccaaggacacctacgacgcccttcacatgcaggccctgccccctcgctaa

SEQ ID NO: 221 - protein, 3533 aa, Artificial Sequence
  Synthesized
ATGGCCTTACCAGTGACCGCCTTGCTCCTGCCGCTGGCCTTGCTGCTCCACGCCGCCAGGCCGGACATCGTGATGACCCAGTCCCCCTCCAGCCTGACAGTGACAGCCGGCGAGAAGGTGACAATGATCTGTAAGTCCAGCCAGAGCCTGCTGAACAGCGGCGACCAGAAGAACTACCTGACCTGGTACCAGCAGAAGCCTGGCCAGCCCCCCAAGCTGCTGATCTTCTGGGCCAGCACAAGGGAGAGCGGCGTGCCCGACAGATTCACAGGCAGCGGCAGCGGCACCGACTTCACACTGACCATTTCCTCCGTGCAGGCCGAGGACCTCGCCGTGTACTACTGCCAGAACGACTACTCCTACCCCCTGACATTCGGCGCCGGCACCAAACTGGAGCTGAAGGGTGGCGGTGGCTCGGGCGGTGGTGGGTCGGGTGGCGGCGGATCTCAGGTGCAGCTCCAGCAGTCCGATGCCGAGCTGGTGAAGCCCGGAAGCAGCGTCAAGATCAGCTGTAAGGCCTCCGGCTACACCTTCACAGACCACGCCATCCACTGGGTGAAGCAGAAGCCCGAGCAGGGCCTGGAGTGGATCGGCCACTTTAGCCCCGGAAACACCGACATCAAGTACAACGACAAGTTCAAGGGCAAGGCCACCCTGACCGTGGACAGGAGCAGCAGCACCGCCTACATGCAGCTGAACAGCCTGACAAGCGAGGACAGCGCCGTGTACTTCTGCAAGACCTCCACCTTCTTCTTCGACTACTGGGGCCAGGGAACCACCCTGACAGTGTCCAGCACCACGACGCCAGCGCCGCGACCACCAACACCGGCGCCCACCATCGCGTCGCAGCCCCTGTCCCTGCGCCCAGAGGCGTGCCGGCCAGCGGCGGGGGGCGCAGTGCACACGAGGGGGCTGGACTTCGCCTGTGATATCTACATCTGGGCGCCCTTGGCCGGGACTTGTGGGGTCCTTCTCCTGTCACTGGTTATCACCCTTTACTGCAAACGGGGCAGAAAGAAACTCCTGTATATATTCAAACAACCATTTATGAGACCAGTACAAACTACTCAAGAGGAAGATGGCTGTAGCTGCCGATTTCCAGAAGAAGAAGAAGGAGGATGTGAACTGAGAGTGAAGTTCAGCAGGAGCGCAGACGCCCCCGCGTACAAGCAGGGCCAGAACCAGCTCTATAACGAGCTCAATCTAGGACGAAGAGAGGAGTACGATGTTTTGGACAAGAGGCGTGGCCGGGACCCTGAGATGGGGGGAAAGCCGAGAAGGAAGAACCCTCAGGAAGGCCTGTACAATGAACTGCAGAAAGATAAGATGGCGGAGGCCTACAGTGAGATTGGGATGAAAGGCGAGCGCCGGAGGGGCAAGGGGCACGATGGCCTTTACCAGGGTCTCAGTACAGCCACCAAGGACACCTACGACGCCCTTCACATGCAGGCCCTGCCCCCTCGCTAATCTAGAGGCGCGCCCCTCTCCCTCCCCCCCCCCTAACGTTACTGGCCGAAGCCGCTTGGAATAAGGCCGGTGTGCGTTTGTCTATATGTTATTTTCCACCATATTGCCGTCTTTTGGCAATGTGAGGGCCCGGAAACCTGGCCCTGTCTTCTTGACGAGCATTCCTAGGGGTCTTTCCCCTCTCGCCAAAGGAATGCAAGGTCTGTTGAATGTCGTGAAGGAAGCAGTTCCTCTGGAAGCTTCTTGAAGACAAACAACGTCTGTAGCGACCCTTTGCAGGCAGCGGAACCCCCCACCTGGCGACAGGTGCCTCTGCGGCCAAAAGCCACGTGTATAAGATACACCTGCAAAGGCGGCACAACCCCAGTGCCACGTTGTGAGTTGGATAGTTGTGGAAAGAGTCAAATGGCTCTCCTCAAGCGTATTCAACAAGGGGCTGAAGGATGCCCAGAAGGTACCCCATTGTATGGGATCTGATCTGGGGCCTCGGTACACATGCTTTACATGTGTTTAGTCGAGGTTAAAAAAACGTCTAGGCCCCCCGAACCACGGGGACGTGGTTTTCCTTTGAAAAACACGATGATAATATGGCCACAACCCATATGATGGCCTTACCAGTGACCGCCTTGCTCCTGCCGCTGGCCTTGCTGCTCCACGCCGCCAGGCCGGATATCCAGATGACCCAGAGCCCGAGCAGCCTGAGCGCGAGCGTGGGTGATCGCGTGACCATTACCTGCAGGGCAAGTCAGGACATTAGTAAATATTTAAATTGGTATCAGCAGAAACCGGGTAAAGCGCCGAAACTGTTAATTTATCATACATCAAGATTACACTCAGGCGTGCCGTCGCGTTTTAGCGGCTCGGGTTCGGGCACCGATTTTACCCTGACCATCTCGAGCTTGCAGCCGGAGGACTTCGCCACCTACTATTGCCAACAGGGTAATACGCTTCCGTACACGTTCGGTCAGGGCACCAAAGTGGAGATCAAAGGTGGCGGTGGCTCGGGCGGTGGTGGGTCGGGTGGCGGCGGATCTGAGGTGCAGCTGGTGGAGTCTGGGGGAGGCTTGGTACAGCCTGGGGGGTCCCTGAGACTCTCCTGTGCAGCCTCTGGAGTGTCCCTGCCTGATTATGGCGTGTCCTGGGTCCGCCAGGCTCCAGGGAAGGGGCTGGAGTGGGTTTCAGTGATCTGGGGCAGCGAGACAACCTACTACAACAGCGCCCTGAAGTCCCGATTCACCATCTCCAGAGACAATGCCAAGAACTCACTGTATCTGCAAATGAACAGCCTGAGAGCCGAGGACACGGCTGTGTATTACTGTGCGAAGCACTACTACTACGGCGGCAGCTACGCTATGGACTACTGGGGCCAAGGAACCCTGGTCACCGTGTCCTCAACCACGACGCCAGCGCCGCGACCACCAACACCGGCGCCCACCATCGCGTCGCAGCCCCTGTCCCTGCGCCCAGAGGCGTGCCGGCCAGCGGCGGGGGGCGCAGTGCACACGAGGGGGCTGGACTTCGCCTGTGATATCTACATCTGGGCGCCCTTGGCCGGGACTTGTGGGGTCCTTCTCCTGTCACTGGTTATCACCCTTTACTGCAAACGGGGCAGAAAGAAACTCCTGTATATATTCAAACAACCATTTATGAGACCAGTACAAACTACTCAAGAGGAAGATGGCTGTAGCTGCCGATTTCCAGAAGAAGAAGAAGGAGGATGTGAACTGAGAGTGAAGTTCAGCAGGAGCGCAGACGCCCCCGCGTACAAGCAGGGCCAGAACCAGCTCTATAACGAGCTCAATCTAGGACGAAGAGAGGAGTACGATGTTTTGGACAAGAGGCGTGGCCGGGACCCTGAGATGGGGGGAAAGCCGAGAAGGAAGAACCCTCAGGAAGGCCTGTACAATGAACTGCAGAAAGATAAGATGGCGGAGGCCTACAGTGAGATTGGGATGAAAGGCGAGCGCCGGAGGGGCAAGGGGCACGATGGCCTTTACCAGGGTCTCAGTACAGCCACCAAGGACACCTACGACGCCCTTCACATGCAGGCCCTGCCCCCTCGCTAA

SEQ ID NO: 222 - DNA, 3524 bp, Artificial Sequence
  Synthesized
atggccttaccagtgaccgccttgctcctgccgctggccttgctgctccacgccgccaggccggacatcgtgatgacccagtccccctccagcctgacagtgacagccggcgagaaggtgacaatgatctgtaagtccagccagagcctgctgaacagcggcgaccagaagaactacctgacctggtaccagcagaagcctggccagccccccaagctgctgatcttctgggccagcacaagggagagcggcgtgcccgacagattcacaggcagcggcagcggcaccgacttcacactgaccatttcctccgtgcaggccgaggacctcgccgtgtactactgccagaacgactactcctaccccctgacattcggcgccggcaccaaactggagctgaagggtggcggtggctcgggcggtggtgggtcgggtggcggcggatctcaggtgcagctccagcagtccgatgccgagctggtgaagcccggaagcagcgtcaagatcagctgtaaggcctccggctacaccttcacagaccacgccatccactgggtgaagcagaagcccgagcagggcctggagtggatcggccactttagccccggaaacaccgacatcaagtacaacgacaagttcaagggcaaggccaccctgaccgtggacaggagcagcagcaccgcctacatgcagctgaacagcctgacaagcgaggacagcgccgtgtacttctgcaagacctccaccttcttcttcgactactggggccagggaaccaccctgacagtgtccagcaccacgacgccagcgccgcgaccaccaacaccggcgcccaccatcgcgtcgcagcccctgtccctgcgcccagaggcgtgccggccagcggcggggggcgcagtgcacacgagggggctggacttcgcctgtgatatctacatctgggcgcccttggccgggacttgtggggtccttctcctgtcactggttatcaccaaacggggcagaaagaaactcctgtatatattcaaacaaccatttatgagaccagtacaaactactcaagaggaagatggctgtagctgccgatttccagaagaagaagaaggaggatgtgaactgagagtgaagttcagcaggagcgcagacgcccccgcgtacaagcagggccagaaccagctctataacgagctcaatctaggacgaagagaggagtacgatgttttggacaagaggcgtggccgggaccctgagatggggggaaagccgagaaggaagaaccctcaggaaggcctgtacaatgaactgcagaaagataagatggcggaggcctacagtgagattgggatgaaaggcgagcgccggaggggcaaggggcacgatggcctttaccagggtctcagtacagccaccaaggacacctacgacgcccttcacatgcaggccctgccccctcgctaatctagaggcgcgcccctctccctcccccccccctaacgttactggccgaagccgcttggaataaggccggtgtgcgtttgtctatatgttattttccaccatattgccgtcttttggcaatgtgagggcccggaaacctggccctgtcttcttgacgagcattcctaggggtctttcccctctcgccaaaggaatgcaaggtctgttgaatgtcgtgaaggaagcagttcctctggaagcttcttgaagacaaacaacgtctgtagcgaccctttgcaggcagcggaaccccccacctggcgacaggtgcctctgcggccaaaagccacgtgtataagatacacctgcaaaggcggcacaaccccagtgccacgttgtgagttggatagttgtggaaagagtcaaatggctctcctcaagcgtattcaacaaggggctgaaggatgcccagaaggtaccccattgtatgggatctgatctggggcctcggtacacatgctttacatgtgtttagtcgaggttaaaaaaacgtctaggccccccgaaccacggggacgtggttttcctttgaaaaacacgatgataatatggccacaacccatatgatggccttaccagtgaccgccttgctcctgccgctggccttgctgctccacgccgccaggccggatatccagatgacccagagcccgagcagcctgagcgcgagcgtgggtgatcgcgtgaccattacctgcagggcaagtcaggacattagtaaatatttaaattggtatcagcagaaaccgggtaaagcgccgaaactgttaatttatcatacatcaagattacactcaggcgtgccgtcgcgttttagcggctcgggttcgggcaccgattttaccctgaccatctcgagcttgcagccggaggacttcgccacctactattgccaacagggtaatacgcttccgtacacgttcggtcagggcaccaaagtggagatcaaaggtggcggtggctcgggcggtggtgggtcgggtggcggcggatctgaggtgcagctggtggagtctgggggaggcttggtacagcctggggggtccctgagactctcctgtgcagcctctggagtgtccctgcctgattatggcgtgtcctgggtccgccaggctccagggaaggggctggagtgggtttcagtgatctggggcagcgagacaacctactacaacagcgccctgaagtcccgattcaccatctccagagacaatgccaagaactcactgtatctgcaaatgaacagcctgagagccgaggacacggctgtgtattactgtgcgaagcactactactacggcggcagctacgctatggactactggggccaaggaaccctggtcaccgtgtcctcaaccacgacgccagcgccgcgaccaccaacaccggcgcccaccatcgcgtcgcagcccctgtccctgcgcccagaggcgtgccggccagcggcggggggcgcagtgcacacgagggggctggacttcgcctgtgatatctacatctgggcgcccttggccgggacttgtggggtccttctcctgtcactggttatcaccctttactgcaaacggggcagaaagaaactcctgtatatattcaaacaaccatttatgagaccagtacaaactactcaagaggaagatggctgtagctgccgatttccagaagaagaagaaggaggatgtgaactgagagtgaagttcagcaggagcgcagacgcccccgcgtacaagcagggccagaaccagctctataacgagctcaatctaggacgaagagaggagtacgatgttttggacaagaggcgtggccgggaccctgagatggggggaaagccgagaaggaagaaccctcaggaaggcctgtacaatgaactgcagaaagataagatggcggaggcctacagtgagattgggatgaaaggcgagcgccggaggggcaaggggcacgatggcctttaccagggtctcagtacagccaccaaggacacctacgacgcccttcacatgcaggccctgccccctcgctaa

SEQ ID NO: 223 - DNA, 3524 bp, Artificial Sequence
  Synthesized
atggccttaccagtgaccgccttgctcctgccgctggccttgctgctccacgccgccaggccggacatcgtgatgacccagtccccctccagcctgacagtgacagccggcgagaaggtgacaatgatctgtaagtccagccagagcctgctgaacagcggcgaccagaagaactacctgacctggtaccagcagaagcctggccagccccccaagctgctgatcttctgggccagcacaagggagagcggcgtgcccgacagattcacaggcagcggcagcggcaccgacttcacactgaccatttcctccgtgcaggccgaggacctcgccgtgtactactgccagaacgactactcctaccccctgacattcggcgccggcaccaaactggagctgaagggtggcggtggctcgggcggtggtgggtcgggtggcggcggatctcaggtgcagctccagcagtccgatgccgagctggtgaagcccggaagcagcgtcaagatcagctgtaaggcctccggctacaccttcacagaccacgccatccactgggtgaagcagaagcccgagcagggcctggagtggatcggccactttagccccggaaacaccgacatcaagtacaacgacaagttcaagggcaaggccaccctgaccgtggacaggagcagcagcaccgcctacatgcagctgaacagcctgacaagcgaggacagcgccgtgtacttctgcaagacctccaccttcttcttcgactactggggccagggaaccaccctgacagtgtccagcaccacgacgccagcgccgcgaccaccaacaccggcgcccaccatcgcgtcgcagcccctgtccctgcgcccagaggcgtgccggccagcggcggggggcgcagtgcacacgagggggctggacttcgcctgtgatatctacatctgggcgcccttggccgggacttgtggggtccttctcctgtcactggttatcaccctttactgcaaacggggcagaaagaaactcctgtatatattcaaacaaccatttatgagaccagtacaaactactcaagaggaagatggctgtagctgccgatttccagaagaagaagaaggaggatgtgaactgagagtgaagttcagcaggagcgcagacgcccccgcgtacaagcagggccagaaccagctctataacgagctcaatctaggacgaagagaggagtacgatgttttggacaagaggcgtggccgggaccctgagatggggggaaagccgagaaggaagaaccctcaggaaggcctgtacaatgaactgcagaaagataagatggcggaggcctacagtgagattgggatgaaaggcgagcgccggaggggcaaggggcacgatggcctttaccagggtctcagtacagccaccaaggacacctacgacgcccttcacatgcaggccctgccccctcgctaatctagaggcgcgcccctctccctcccccccccctaacgttactggccgaagccgcttggaataaggccggtgtgcgtttgtctatatgttattttccaccatattgccgtcttttggcaatgtgagggcccggaaacctggccctgtcttcttgacgagcattcctaggggtctttcccctctcgccaaaggaatgcaaggtctgttgaatgtcgtgaaggaagcagttcctctggaagcttcttgaagacaaacaacgtctgtagcgaccctttgcaggcagcggaaccccccacctggcgacaggtgcctctgcggccaaaagccacgtgtataagatacacctgcaaaggcggcacaaccccagtgccacgttgtgagttggatagttgtggaaagagtcaaatggctctcctcaagcgtattcaacaaggggctgaaggatgcccagaaggtaccccattgtatgggatctgatctggggcctcggtacacatgctttacatgtgtttagtcgaggttaaaaaaacgtctaggccccccgaaccacggggacgtggttttcctttgaaaaacacgatgataatatggccacaacccatatgatggccttaccagtgaccgccttgctcctgccgctggccttgctgctccacgccgccaggccggatatccagatgacccagagcccgagcagcctgagcgcgagcgtgggtgatcgcgtgaccattacctgcagggcaagtcaggacattagtaaatatttaaattggtatcagcagaaaccgggtaaagcgccgaaactgttaatttatcatacatcaagattacactcaggcgtgccgtcgcgttttagcggctcgggttcgggcaccgattttaccctgaccatctcgagcttgcagccggaggacttcgccacctactattgccaacagggtaatacgcttccgtacacgttcggtcagggcaccaaagtggagatcaaaggtggcggtggctcgggcggtggtgggtcgggtggcggcggatctgaggtgcagctggtggagtctgggggaggcttggtacagcctggggggtccctgagactctcctgtgcagcctctggagtgtccctgcctgattatggcgtgtcctgggtccgccaggctccagggaaggggctggagtgggtttcagtgatctggggcagcgagacaacctactacaacagcgccctgaagtcccgattcaccatctccagagacaatgccaagaactcactgtatctgcaaatgaacagcctgagagccgaggacacggctgtgtattactgtgcgaagcactactactacggcggcagctacgctatggactactggggccaaggaaccctggtcaccgtgtcctcaaccacgacgccagcgccgcgaccaccaacaccggcgcccaccatcgcgtcgcagcccctgtccctgcgcccagaggcgtgccggccagcggcggggggcgcagtgcacacgagggggctggacttcgcctgtgatatctacatctgggcgcccttggccgggacttgtggggtccttctcctgtcactggttatcaccaaacggggcagaaagaaactcctgtatatattcaaacaaccatttatgagaccagtacaaactactcaagaggaagatggctgtagctgccgatttccagaagaagaagaaggaggatgtgaactgagagtgaagttcagcaggagcgcagacgcccccgcgtacaagcagggccagaaccagctctataacgagctcaatctaggacgaagagaggagtacgatgttttggacaagaggcgtggccgggaccctgagatggggggaaagccgagaaggaagaaccctcaggaaggcctgtacaatgaactgcagaaagataagatggcggaggcctacagtgagattgggatgaaaggcgagcgccggaggggcaaggggcacgatggcctttaccagggtctcagtacagccaccaaggacacctacgacgcccttcacatgcaggccctgccccctcgctaa

SEQ ID NO: 224 - DNA, 3515 bp, Artificial Sequence
  Synthesized
atggccttaccagtgaccgccttgctcctgccgctggccttgctgctccacgccgccaggccggacatcgtgatgacccagtccccctccagcctgacagtgacagccggcgagaaggtgacaatgatctgtaagtccagccagagcctgctgaacagcggcgaccagaagaactacctgacctggtaccagcagaagcctggccagccccccaagctgctgatcttctgggccagcacaagggagagcggcgtgcccgacagattcacaggcagcggcagcggcaccgacttcacactgaccatttcctccgtgcaggccgaggacctcgccgtgtactactgccagaacgactactcctaccccctgacattcggcgccggcaccaaactggagctgaagggtggcggtggctcgggcggtggtgggtcgggtggcggcggatctcaggtgcagctccagcagtccgatgccgagctggtgaagcccggaagcagcgtcaagatcagctgtaaggcctccggctacaccttcacagaccacgccatccactgggtgaagcagaagcccgagcagggcctggagtggatcggccactttagccccggaaacaccgacatcaagtacaacgacaagttcaagggcaaggccaccctgaccgtggacaggagcagcagcaccgcctacatgcagctgaacagcctgacaagcgaggacagcgccgtgtacttctgcaagacctccaccttcttcttcgactactggggccagggaaccaccctgacagtgtccagcaccacgacgccagcgccgcgaccaccaacaccggcgcccaccatcgcgtcgcagcccctgtccctgcgcccagaggcgtgccggccagcggcggggggcgcagtgcacacgagggggctggacttcgcctgtgatatctacatctgggcgcccttggccgggacttgtggggtccttctcctgtcactggttatcaccaaacggggcagaaagaaactcctgtatatattcaaacaaccatttatgagaccagtacaaactactcaagaggaagatggctgtagctgccgatttccagaagaagaagaaggaggatgtgaactgagagtgaagttcagcaggagcgcagacgcccccgcgtacaagcagggccagaaccagctctataacgagctcaatctaggacgaagagaggagtacgatgttttggacaagaggcgtggccgggaccctgagatggggggaaagccgagaaggaagaaccctcaggaaggcctgtacaatgaactgcagaaagataagatggcggaggcctacagtgagattgggatgaaaggcgagcgccggaggggcaaggggcacgatggcctttaccagggtctcagtacagccaccaaggacacctacgacgcccttcacatgcaggccctgccccctcgctaatctagaggcgcgcccctctccctcccccccccctaacgttactggccgaagccgcttggaataaggccggtgtgcgtttgtctatatgttattttccaccatattgccgtcttttggcaatgtgagggcccggaaacctggccctgtcttcttgacgagcattcctaggggtctttcccctctcgccaaaggaatgcaaggtctgttgaatgtcgtgaaggaagcagttcctctggaagcttcttgaagacaaacaacgtctgtagcgaccctttgcaggcagcggaaccccccacctggcgacaggtgcctctgcggccaaaagccacgtgtataagatacacctgcaaaggcggcacaaccccagtgccacgttgtgagttggatagttgtggaaagagtcaaatggctctcctcaagcgtattcaacaaggggctgaaggatgcccagaaggtaccccattgtatgggatctgatctggggcctcggtacacatgctttacatgtgtttagtcgaggttaaaaaaacgtctaggccccccgaaccacggggacgtggttttcctttgaaaaacacgatgataatatggccacaacccatatgatggccttaccagtgaccgccttgctcctgccgctggccttgctgctccacgccgccaggccggatatccagatgacccagagcccgagcagcctgagcgcgagcgtgggtgatcgcgtgaccattacctgcagggcaagtcaggacattagtaaatatttaaattggtatcagcagaaaccgggtaaagcgccgaaactgttaatttatcatacatcaagattacactcaggcgtgccgtcgcgttttagcggctcgggttcgggcaccgattttaccctgaccatctcgagcttgcagccggaggacttcgccacctactattgccaacagggtaatacgcttccgtacacgttcggtcagggcaccaaagtggagatcaaaggtggcggtggctcgggcggtggtgggtcgggtggcggcggatctgaggtgcagctggtggagtctgggggaggcttggtacagcctggggggtccctgagactctcctgtgcagcctctggagtgtccctgcctgattatggcgtgtcctgggtccgccaggctccagggaaggggctggagtgggtttcagtgatctggggcagcgagacaacctactacaacagcgccctgaagtcccgattcaccatctccagagacaatgccaagaactcactgtatctgcaaatgaacagcctgagagccgaggacacggctgtgtattactgtgcgaagcactactactacggcggcagctacgctatggactactggggccaaggaaccctggtcaccgtgtcctcaaccacgacgccagcgccgcgaccaccaacaccggcgcccaccatcgcgtcgcagcccctgtccctgcgcccagaggcgtgccggccagcggcggggggcgcagtgcacacgagggggctggacttcgcctgtgatatctacatctgggcgcccttggccgggacttgtggggtccttctcctgtcactggttatcaccaaacggggcagaaagaaactcctgtatatattcaaacaaccatttatgagaccagtacaaactactcaagaggaagatggctgtagctgccgatttccagaagaagaagaaggaggatgtgaactgagagtgaagttcagcaggagcgcagacgcccccgcgtacaagcagggccagaaccagctctataacgagctcaatctaggacgaagagaggagtacgatgttttggacaagaggcgtggccgggaccctgagatggggggaaagccgagaaggaagaaccctcaggaaggcctgtacaatgaactgcagaaagataagatggcggaggcctacagtgagattgggatgaaaggcgagcgccggaggggcaaggggcacgatggcctttaccagggtctcagtacagccaccaaggacacctacgacgcccttcacatgcaggccctgccccctcgctaa

SEQ ID NO: 225 - DNA, 3545 bp, Artificial Sequence
  Synthesized
atggccttaccagtgaccgccttgctcctgccgctggccttgctgctccacgccgccaggccggatattgtgatgacccagtccccgtcctccctgaccgtgaccgcgggcgaaaaagtgaccatgatttgcaaatcctcccagtccctgctgaattccggcgatcagaaaaattatctgacctggtatcagcagaaaccgggccagccgccgaaactgctgattttttgggcgtccacccgtgaatccggcgtgccggatcgttttaccggctccggctccggcaccgattttaccctgaccatttcctccgtgcaggcggaagatctggcggtgtattattgccagaatgattattcctatccgctgacctttggcgcgggcaccaaactggaactgaaaggcggcggcggctccggcggcggcggctccggcggcggcggctcccaggtgcagctgcagcagtccgatgcggaactggtgaaaccgggctcctccgtgaaaatttcctgcaaagcgtccggctatacctttaccgatcatgcgattcattgggtgaaacagaaaccggaacagggcctggaatggattggccatttttccccgggcaataccgatattaaatataatgataaatttaaaggcaaagcgaccctgaccgtggatcgttcctcctccaccgcgtatatgcagctgaattccctgacctccgaagattccgcggtgtatttttgcaaaacctccacctttttttttgattattggggccagggcaccaccctgaccgtgtcctccaccacgacgccagcgccgcgaccaccaacaccggcgcccaccatcgcgtcgcagcccctgtccctgcgcccagaggcgtgccggccagcggcggggggcgcagtgcacacgagggggctggacttcgcctgtgatatctacatctgggcgcccttggccgggacttgtggggtccttctcctgtcactggttatcaccctttactgcaaacggggcagaaagaaactcctgtatatattcaaacaaccatttatgagaccagtacaaactactcaagaggaagatggctgtagctgccgatttccagaagaagaagaaggaggatgtgaactgagagtgaagttcagcaggagcgcagacgcccccgcgtacaagcagggccagaaccagctctataacgagctcaatctaggacgaagagaggagtacgatgttttggacaagaggcgtggccgggaccctgagatggggggaaagccgagaaggaagaaccctcaggaaggcctgtacaatgaactgcagaaagataagatggcggaggcctacagtgagattgggatgaaaggcgagcgccggaggggcaaggggcacgatggcctttaccagggtctcagtacagccaccaaggacacctacgacgcccttcacatgcaggccctgccccctcgctaatctagaggcgcgcccctctccctcccccccccctaacgttactggccgaagccgcttggaataaggccggtgtgcgtttgtctatatgttattttccaccatattgccgtcttttggcaatgtgagggcccggaaacctggccctgtcttcttgacgagcattcctaggggtctttcccctctcgccaaaggaatgcaaggtctgttgaatgtcgtgaaggaagcagttcctctggaagcttcttgaagacaaacaacgtctgtagcgaccctttgcaggcagcggaaccccccacctggcgacaggtgcctctgcggccaaaagccacgtgtataagatacacctgcaaaggcggcacaaccccagtgccacgttgtgagttggatagttgtggaaagagtcaaatggctctcctcaagcgtattcaacaaggggctgaaggatgcccagaaggtaccccattgtatgggatctgatctggggcctcggtacacatgctttacatgtgtttagtcgaggttaaaaaaacgtctaggccccccgaaccacggggacgtggttttcctttgaaaaacacgatgataatatggccacaacccatatgatggccttaccagtgaccgccttgctcctgccgctggccttgctgctccacgccgccaggccggatatccagatgacccagagcccaagctccctgtccgcctctgtgggcgacagggtgaccatcacatgccgcgccagccagacaatctggtcctacctgaactggtatcagcagagacccggcaaggcccctaatctgctgatctacgcagcatctagcctgcagtctggagtgccctcccggttctctggaagaggatccggaaccgacttcaccctgacaatctcctctctgcaggccgaggacttcgccacatactattgccagcagagctattccatccctcagacctttggccagggcacaaagctggagatcaagggcggcggcggctctggaggaggaggaagcggaggaggaggatcccaggtgcagctgcagcagagcggaccaggactggtgaagccctcccagaccctgtctctgacatgtgccatcagcggcgattccgtgagctccaacagcgccgcctggaattggatccggcagtctcccagcagaggactggagtggctgggaaggacctactatcgctccaagtggtacaacgattatgccgtgtctgtgaagagccggatcaccatcaaccctgacacatctaagaatcagttcagcctgcagctgaattccgtgaccccagaggacacagccgtgtactattgtgcaagggaggtgaccggcgacctggaggatgcctttgacatctggggccagggcaccatggtgacagtgtctagcaccacgacgccagcgccgcgaccaccaacaccggcgcccaccatcgcgtcgcagcccctgtccctgcgcccagaggcgtgccggccagcggcggggggcgcagtgcacacgagggggctggacttcgcctgtgatatctacatctgggcgcccttggccgggacttgtggggtccttctcctgtcactggttatcaccctttactgcaaacggggcagaaagaaactcctgtatatattcaaacaaccatttatgagaccagtacaaactactcaagaggaagatggctgtagctgccgatttccagaagaagaagaaggaggatgtgaactgagagtgaagttcagcaggagcgcagacgcccccgcgtacaagcagggccagaaccagctctataacgagctcaatctaggacgaagagaggagtacgatgttttggacaagaggcgtggccgggaccctgagatggggggaaagccgagaaggaagaaccctcaggaaggcctgtacaatgaactgcagaaagataagatggcggaggcctacagtgagattgggatgaaaggcgagcgccggaggggcaaggggcacgatggcctttaccagggtctcagtacagccaccaaggacacctacgacgcccttcacatgcaggccctgccccctcgctaa

SEQ ID NO: 226 - protein, 490 aa, Artificial Sequence
  Synthesized
MALPVTALLLPLALLLHAARPDIQMTQSPSSLSASVGDRVTITCRASQTIWSYLNWYQQRPGKAPNLLIYAASSLQSGVPSRFSGRGSGTDFTLTISSLQAEDFATYYCQQSYSIPQTFGQGTKLEIKGGGGSGGGGSGGGGSQVQLQQSGPGLVKPSQTLSLTCAISGDSVSSNSAAWNWIRQSPSRGLEWLGRTYYRSKWYNDYAVSVKSRITINPDTSKNQFSLQLNSVTPEDTAVYYCAREVTGDLEDAFDIWGQGTMVTVSSTTTPAPRPPTPAPTIASQPLSLRPEACRPAAGGAVHTRGLDFACDIYIWAPLAGTCGVLLLSLVITLYCKRGRKKLLYIFKQPFMRPVQTTQEEDGCSCRFPEEEEGGCELRVKFSRSADAPAYQQGQNQLYNELNLGRREEYDVLDKRRGRDPEMGGKPRRKNPQEGLYNELQKDKMAEAYSEIGMKGERRRGKGHDGLYQGLSTATKDTYDALHMQALPPR

SEQ ID NO: 227 - DNA, 3536 bp, Artificial Sequence
  Synthesized
atggccttaccagtgaccgccttgctcctgccgctggccttgctgctccacgccgccaggccggatattgtgatgacccagtccccgtcctccctgaccgtgaccgcgggcgaaaaagtgaccatgatttgcaaatcctcccagtccctgctgaattccggcgatcagaaaaattatctgacctggtatcagcagaaaccgggccagccgccgaaactgctgattttttgggcgtccacccgtgaatccggcgtgccggatcgttttaccggctccggctccggcaccgattttaccctgaccatttcctccgtgcaggcggaagatctggcggtgtattattgccagaatgattattcctatccgctgacctttggcgcgggcaccaaactggaactgaaaggcggcggcggctccggcggcggcggctccggcggcggcggctcccaggtgcagctgcagcagtccgatgcggaactggtgaaaccgggctcctccgtgaaaatttcctgcaaagcgtccggctatacctttaccgatcatgcgattcattgggtgaaacagaaaccggaacagggcctggaatggattggccatttttccccgggcaataccgatattaaatataatgataaatttaaaggcaaagcgaccctgaccgtggatcgttcctcctccaccgcgtatatgcagctgaattccctgacctccgaagattccgcggtgtatttttgcaaaacctccacctttttttttgattattggggccagggcaccaccctgaccgtgtcctccaccacgacgccagcgccgcgaccaccaacaccggcgcccaccatcgcgtcgcagcccctgtccctgcgcccagaggcgtgccggccagcggcggggggcgcagtgcacacgagggggctggacttcgcctgtgatatctacatctgggcgcccttggccgggacttgtggggtccttctcctgtcactggttatcaccaaacggggcagaaagaaactcctgtatatattcaaacaaccatttatgagaccagtacaaactactcaagaggaagatggctgtagctgccgatttccagaagaagaagaaggaggatgtgaactgagagtgaagttcagcaggagcgcagacgcccccgcgtacaagcagggccagaaccagctctataacgagctcaatctaggacgaagagaggagtacgatgttttggacaagaggcgtggccgggaccctgagatggggggaaagccgagaaggaagaaccctcaggaaggcctgtacaatgaactgcagaaagataagatggcggaggcctacagtgagattgggatgaaaggcgagcgccggaggggcaaggggcacgatggcctttaccagggtctcagtacagccaccaaggacacctacgacgcccttcacatgcaggccctgccccctcgctaatctagaggcgcgcccctctccctcccccccccctaacgttactggccgaagccgcttggaataaggccggtgtgcgtttgtctatatgttattttccaccatattgccgtcttttggcaatgtgagggcccggaaacctggccctgtcttcttgacgagcattcctaggggtctttcccctctcgccaaaggaatgcaaggtctgttgaatgtcgtgaaggaagcagttcctctggaagcttcttgaagacaaacaacgtctgtagcgaccctttgcaggcagcggaaccccccacctggcgacaggtgcctctgcggccaaaagccacgtgtataagatacacctgcaaaggcggcacaaccccagtgccacgttgtgagttggatagttgtggaaagagtcaaatggctctcctcaagcgtattcaacaaggggctgaaggatgcccagaaggtaccccattgtatgggatctgatctggggcctcggtacacatgctttacatgtgtttagtcgaggttaaaaaaacgtctaggccccccgaaccacggggacgtggttttcctttgaaaaacacgatgataatatggccacaacccatatgatggccttaccagtgaccgccttgctcctgccgctggccttgctgctccacgccgccaggccggatatccagatgacccagagcccaagctccctgtccgcctctgtgggcgacagggtgaccatcacatgccgcgccagccagacaatctggtcctacctgaactggtatcagcagagacccggcaaggcccctaatctgctgatctacgcagcatctagcctgcagtctggagtgccctcccggttctctggaagaggatccggaaccgacttcaccctgacaatctcctctctgcaggccgaggacttcgccacatactattgccagcagagctattccatccctcagacctttggccagggcacaaagctggagatcaagggcggcggcggctctggaggaggaggaagcggaggaggaggatcccaggtgcagctgcagcagagcggaccaggactggtgaagccctcccagaccctgtctctgacatgtgccatcagcggcgattccgtgagctccaacagcgccgcctggaattggatccggcagtctcccagcagaggactggagtggctgggaaggacctactatcgctccaagtggtacaacgattatgccgtgtctgtgaagagccggatcaccatcaaccctgacacatctaagaatcagttcagcctgcagctgaattccgtgaccccagaggacacagccgtgtactattgtgcaagggaggtgaccggcgacctggaggatgcctttgacatctggggccagggcaccatggtgacagtgtctagcaccacgacgccagcgccgcgaccaccaacaccggcgcccaccatcgcgtcgcagcccctgtccctgcgcccagaggcgtgccggccagcggcggggggcgcagtgcacacgagggggctggacttcgcctgtgatatctacatctgggcgcccttggccgggacttgtggggtccttctcctgtcactggttatcaccctttactgcaaacggggcagaaagaaactcctgtatatattcaaacaaccatttatgagaccagtacaaactactcaagaggaagatggctgtagctgccgatttccagaagaagaagaaggaggatgtgaactgagagtgaagttcagcaggagcgcagacgcccccgcgtacaagcagggccagaaccagctctataacgagctcaatctaggacgaagagaggagtacgatgttttggacaagaggcgtggccgggaccctgagatggggggaaagccgagaaggaagaaccctcaggaaggcctgtacaatgaactgcagaaagataagatggcggaggcctacagtgagattgggatgaaaggcgagcgccggaggggcaaggggcacgatggcctttaccagggtctcagtacagccaccaaggacacctacgacgcccttcacatgcaggccctgccccctcgctaa

SEQ ID NO: 228 - DNA, 3536 bp, Artificial Sequence
  Synthesized
atggccttaccagtgaccgccttgctcctgccgctggccttgctgctccacgccgccaggccggatattgtgatgacccagtccccgtcctccctgaccgtgaccgcgggcgaaaaagtgaccatgatttgcaaatcctcccagtccctgctgaattccggcgatcagaaaaattatctgacctggtatcagcagaaaccgggccagccgccgaaactgctgattttttgggcgtccacccgtgaatccggcgtgccggatcgttttaccggctccggctccggcaccgattttaccctgaccatttcctccgtgcaggcggaagatctggcggtgtattattgccagaatgattattcctatccgctgacctttggcgcgggcaccaaactggaactgaaaggcggcggcggctccggcggcggcggctccggcggcggcggctcccaggtgcagctgcagcagtccgatgcggaactggtgaaaccgggctcctccgtgaaaatttcctgcaaagcgtccggctatacctttaccgatcatgcgattcattgggtgaaacagaaaccggaacagggcctggaatggattggccatttttccccgggcaataccgatattaaatataatgataaatttaaaggcaaagcgaccctgaccgtggatcgttcctcctccaccgcgtatatgcagctgaattccctgacctccgaagattccgcggtgtatttttgcaaaacctccacctttttttttgattattggggccagggcaccaccctgaccgtgtcctccaccacgacgccagcgccgcgaccaccaacaccggcgcccaccatcgcgtcgcagcccctgtccctgcgcccagaggcgtgccggccagcggcggggggcgcagtgcacacgagggggctggacttcgcctgtgatatctacatctgggcgcccttggccgggacttgtggggtccttctcctgtcactggttatcaccctttactgcaaacggggcagaaagaaactcctgtatatattcaaacaaccatttatgagaccagtacaaactactcaagaggaagatggctgtagctgccgatttccagaagaagaagaaggaggatgtgaactgagagtgaagttcagcaggagcgcagacgcccccgcgtacaagcagggccagaaccagctctataacgagctcaatctaggacgaagagaggagtacgatgttttggacaagaggcgtggccgggaccctgagatggggggaaagccgagaaggaagaaccctcaggaaggcctgtacaatgaactgcagaaagataagatggcggaggcctacagtgagattgggatgaaaggcgagcgccggaggggcaaggggcacgatggcctttaccagggtctcagtacagccaccaaggacacctacgacgcccttcacatgcaggccctgccccctcgctaatctagaggcgcgcccctctccctcccccccccctaacgttactggccgaagccgcttggaataaggccggtgtgcgtttgtctatatgttattttccaccatattgccgtcttttggcaatgtgagggcccggaaacctggccctgtcttcttgacgagcattcctaggggtctttcccctctcgccaaaggaatgcaaggtctgttgaatgtcgtgaaggaagcagttcctctggaagcttcttgaagacaaacaacgtctgtagcgaccctttgcaggcagcggaaccccccacctggcgacaggtgcctctgcggccaaaagccacgtgtataagatacacctgcaaaggcggcacaaccccagtgccacgttgtgagttggatagttgtggaaagagtcaaatggctctcctcaagcgtattcaacaaggggctgaaggatgcccagaaggtaccccattgtatgggatctgatctggggcctcggtacacatgctttacatgtgtttagtcgaggttaaaaaaacgtctaggccccccgaaccacggggacgtggttttcctttgaaaaacacgatgataatatggccacaacccatatgatggccttaccagtgaccgccttgctcctgccgctggccttgctgctccacgccgccaggccggatatccagatgacccagagcccaagctccctgtccgcctctgtgggcgacagggtgaccatcacatgccgcgccagccagacaatctggtcctacctgaactggtatcagcagagacccggcaaggcccctaatctgctgatctacgcagcatctagcctgcagtctggagtgccctcccggttctctggaagaggatccggaaccgacttcaccctgacaatctcctctctgcaggccgaggacttcgccacatactattgccagcagagctattccatccctcagacctttggccagggcacaaagctggagatcaagggcggcggcggctctggaggaggaggaagcggaggaggaggatcccaggtgcagctgcagcagagcggaccaggactggtgaagccctcccagaccctgtctctgacatgtgccatcagcggcgattccgtgagctccaacagcgccgcctggaattggatccggcagtctcccagcagaggactggagtggctgggaaggacctactatcgctccaagtggtacaacgattatgccgtgtctgtgaagagccggatcaccatcaaccctgacacatctaagaatcagttcagcctgcagctgaattccgtgaccccagaggacacagccgtgtactattgtgcaagggaggtgaccggcgacctggaggatgcctttgacatctggggccagggcaccatggtgacagtgtctagcaccacgacgccagcgccgcgaccaccaacaccggcgcccaccatcgcgtcgcagcccctgtccctgcgcccagaggcgtgccggccagcggcggggggcgcagtgcacacgagggggctggacttcgcctgtgatatctacatctgggcgcccttggccgggacttgtggggtccttctcctgtcactggttatcaccaaacggggcagaaagaaactcctgtatatattcaaacaaccatttatgagaccagtacaaactactcaagaggaagatggctgtagctgccgatttccagaagaagaagaaggaggatgtgaactgagagtgaagttcagcaggagcgcagacgcccccgcgtacaagcagggccagaaccagctctataacgagctcaatctaggacgaagagaggagtacgatgttttggacaagaggcgtggccgggaccctgagatggggggaaagccgagaaggaagaaccctcaggaaggcctgtacaatgaactgcagaaagataagatggcggaggcctacagtgagattgggatgaaaggcgagcgccggaggggcaaggggcacgatggcctttaccagggtctcagtacagccaccaaggacacctacgacgcccttcacatgcaggccctgccccctcgctaa

SEQ ID NO: 229 - protein, 487 aa, Artificial Sequence
  Synthesized
MALPVTALLLPLALLLHAARPDIQMTQSPSSLSASVGDRVTITCRASQTIWSYLNWYQQRPGKAPNLLIYAASSLQSGVPSRFSGRGSGTDFTLTISSLQAEDFATYYCQQSYSIPQTFGQGTKLEIKGGGGSGGGGSGGGGSQVQLQQSGPGLVKPSQTLSLTCAISGDSVSSNSAAWNWIRQSPSRGLEWLGRTYYRSKWYNDYAVSVKSRITINPDTSKNQFSLQLNSVTPEDTAVYYCAREVTGDLEDAFDIWGQGTMVTVSSTTTPAPRPPTPAPTIASQPLSLRPEACRPAAGGAVHTRGLDFACDIYIWAPLAGTCGVLLLSLVITKRGRKKLLYIFKQPFMRPVQTTQEEDGCSCRFPEEEEGGCELRVKFSRSADAPAYQQGQNQLYNELNLGRREEYDVLDKRRGRDPEMGGKPRRKNPQEGLYNELQKDKMAEAYSEIGMKGERRRGKGHDGLYQGLSTATKDTYDALHMQALPPR

SEQ ID NO: 230 - DNA, 3527 bp, Artificial Sequence
  Synthesized
atggccttaccagtgaccgccttgctcctgccgctggccttgctgctccacgccgccaggccggatattgtgatgacccagtccccgtcctccctgaccgtgaccgcgggcgaaaaagtgaccatgatttgcaaatcctcccagtccctgctgaattccggcgatcagaaaaattatctgacctggtatcagcagaaaccgggccagccgccgaaactgctgattttttgggcgtccacccgtgaatccggcgtgccggatcgttttaccggctccggctccggcaccgattttaccctgaccatttcctccgtgcaggcggaagatctggcggtgtattattgccagaatgattattcctatccgctgacctttggcgcgggcaccaaactggaactgaaaggcggcggcggctccggcggcggcggctccggcggcggcggctcccaggtgcagctgcagcagtccgatgcggaactggtgaaaccgggctcctccgtgaaaatttcctgcaaagcgtccggctatacctttaccgatcatgcgattcattgggtgaaacagaaaccggaacagggcctggaatggattggccatttttccccgggcaataccgatattaaatataatgataaatttaaaggcaaagcgaccctgaccgtggatcgttcctcctccaccgcgtatatgcagctgaattccctgacctccgaagattccgcggtgtatttttgcaaaacctccacctttttttttgattattggggccagggcaccaccctgaccgtgtcctccaccacgacgccagcgccgcgaccaccaacaccggcgcccaccatcgcgtcgcagcccctgtccctgcgcccagaggcgtgccggccagcggcggggggcgcagtgcacacgagggggctggacttcgcctgtgatatctacatctgggcgcccttggccgggacttgtggggtccttctcctgtcactggttatcaccaaacggggcagaaagaaactcctgtatatattcaaacaaccatttatgagaccagtacaaactactcaagaggaagatggctgtagctgccgatttccagaagaagaagaaggaggatgtgaactgagagtgaagttcagcaggagcgcagacgcccccgcgtacaagcagggccagaaccagctctataacgagctcaatctaggacgaagagaggagtacgatgttttggacaagaggcgtggccgggaccctgagatggggggaaagccgagaaggaagaaccctcaggaaggcctgtacaatgaactgcagaaagataagatggcggaggcctacagtgagattgggatgaaaggcgagcgccggaggggcaaggggcacgatggcctttaccagggtctcagtacagccaccaaggacacctacgacgcccttcacatgcaggccctgccccctcgctaatctagaggcgcgcccctctccctcccccccccctaacgttactggccgaagccgcttggaataaggccggtgtgcgtttgtctatatgttattttccaccatattgccgtcttttggcaatgtgagggcccggaaacctggccctgtcttcttgacgagcattcctaggggtctttcccctctcgccaaaggaatgcaaggtctgttgaatgtcgtgaaggaagcagttcctctggaagcttcttgaagacaaacaacgtctgtagcgaccctttgcaggcagcggaaccccccacctggcgacaggtgcctctgcggccaaaagccacgtgtataagatacacctgcaaaggcggcacaaccccagtgccacgttgtgagttggatagttgtggaaagagtcaaatggctctcctcaagcgtattcaacaaggggctgaaggatgcccagaaggtaccccattgtatgggatctgatctggggcctcggtacacatgctttacatgtgtttagtcgaggttaaaaaaacgtctaggccccccgaaccacggggacgtggttttcctttgaaaaacacgatgataatatggccacaacccatatgatggccttaccagtgaccgccttgctcctgccgctggccttgctgctccacgccgccaggccggatatccagatgacccagagcccaagctccctgtccgcctctgtgggcgacagggtgaccatcacatgccgcgccagccagacaatctggtcctacctgaactggtatcagcagagacccggcaaggcccctaatctgctgatctacgcagcatctagcctgcagtctggagtgccctcccggttctctggaagaggatccggaaccgacttcaccctgacaatctcctctctgcaggccgaggacttcgccacatactattgccagcagagctattccatccctcagacctttggccagggcacaaagctggagatcaagggcggcggcggctctggaggaggaggaagcggaggaggaggatcccaggtgcagctgcagcagagcggaccaggactggtgaagccctcccagaccctgtctctgacatgtgccatcagcggcgattccgtgagctccaacagcgccgcctggaattggatccggcagtctcccagcagaggactggagtggctgggaaggacctactatcgctccaagtggtacaacgattatgccgtgtctgtgaagagccggatcaccatcaaccctgacacatctaagaatcagttcagcctgcagctgaattccgtgaccccagaggacacagccgtgtactattgtgcaagggaggtgaccggcgacctggaggatgcctttgacatctggggccagggcaccatggtgacagtgtctagcaccacgacgccagcgccgcgaccaccaacaccggcgcccaccatcgcgtcgcagcccctgtccctgcgcccagaggcgtgccggccagcggcggggggcgcagtgcacacgagggggctggacttcgcctgtgatatctacatctgggcgcccttggccgggacttgtggggtccttctcctgtcactggttatcaccaaacggggcagaaagaaactcctgtatatattcaaacaaccatttatgagaccagtacaaactactcaagaggaagatggctgtagctgccgatttccagaagaagaagaaggaggatgtgaactgagagtgaagttcagcaggagcgcagacgcccccgcgtacaagcagggccagaaccagctctataacgagctcaatctaggacgaagagaggagtacgatgttttggacaagaggcgtggccgggaccctgagatggggggaaagccgagaaggaagaaccctcaggaaggcctgtacaatgaactgcagaaagataagatggcggaggcctacagtgagattgggatgaaaggcgagcgccggaggggcaaggggcacgatggcctttaccagggtctcagtacagccaccaaggacacctacgacgcccttcacatgcaggccctgccccctcgctaa

SEQ ID NO: 231 - DNA, 3545 bp, Artificial Sequence
  Synthesized
atggccttaccagtgaccgccttgctcctgccgctggccttgctgctccacgccgccaggccggacatcgtgatgacccagtccccctccagcctgacagtgacagccggcgagaaggtgacaatgatctgtaagtccagccagagcctgctgaacagcggcgaccagaagaactacctgacctggtaccagcagaagcctggccagccccccaagctgctgatcttctgggccagcacaagggagagcggcgtgcccgacagattcacaggcagcggcagcggcaccgacttcacactgaccatttcctccgtgcaggccgaggacctcgccgtgtactactgccagaacgactactcctaccccctgacattcggcgccggcaccaaactggagctgaagggtggcggtggctcgggcggtggtgggtcgggtggcggcggatctcaggtgcagctccagcagtccgatgccgagctggtgaagcccggaagcagcgtcaagatcagctgtaaggcctccggctacaccttcacagaccacgccatccactgggtgaagcagaagcccgagcagggcctggagtggatcggccactttagccccggaaacaccgacatcaagtacaacgacaagttcaagggcaaggccaccctgaccgtggacaggagcagcagcaccgcctacatgcagctgaacagcctgacaagcgaggacagcgccgtgtacttctgcaagacctccaccttcttcttcgactactggggccagggaaccaccctgacagtgtccagcaccacgacgccagcgccgcgaccaccaacaccggcgcccaccatcgcgtcgcagcccctgtccctgcgcccagaggcgtgccggccagcggcggggggcgcagtgcacacgagggggctggacttcgcctgtgatatctacatctgggcgcccttggccgggacttgtggggtccttctcctgtcactggttatcaccctttactgcaaacggggcagaaagaaactcctgtatatattcaaacaaccatttatgagaccagtacaaactactcaagaggaagatggctgtagctgccgatttccagaagaagaagaaggaggatgtgaactgagagtgaagttcagcaggagcgcagacgcccccgcgtacaagcagggccagaaccagctctataacgagctcaatctaggacgaagagaggagtacgatgttttggacaagaggcgtggccgggaccctgagatggggggaaagccgagaaggaagaaccctcaggaaggcctgtacaatgaactgcagaaagataagatggcggaggcctacagtgagattgggatgaaaggcgagcgccggaggggcaaggggcacgatggcctttaccagggtctcagtacagccaccaaggacacctacgacgcccttcacatgcaggccctgccccctcgctaatctagaggcgcgcccctctccctcccccccccctaacgttactggccgaagccgcttggaataaggccggtgtgcgtttgtctatatgttattttccaccatattgccgtcttttggcaatgtgagggcccggaaacctggccctgtcttcttgacgagcattcctaggggtctttcccctctcgccaaaggaatgcaaggtctgttgaatgtcgtgaaggaagcagttcctctggaagcttcttgaagacaaacaacgtctgtagcgaccctttgcaggcagcggaaccccccacctggcgacaggtgcctctgcggccaaaagccacgtgtataagatacacctgcaaaggcggcacaaccccagtgccacgttgtgagttggatagttgtggaaagagtcaaatggctctcctcaagcgtattcaacaaggggctgaaggatgcccagaaggtaccccattgtatgggatctgatctggggcctcggtacacatgctttacatgtgtttagtcgaggttaaaaaaacgtctaggccccccgaaccacggggacgtggttttcctttgaaaaacacgatgataatatggccacaacccatatgatggccttaccagtgaccgccttgctcctgccgctggccttgctgctccacgccgccaggccggatatccagatgacccagagcccaagctccctgtccgcctctgtgggcgacagggtgaccatcacatgccgcgccagccagacaatctggtcctacctgaactggtatcagcagagacccggcaaggcccctaatctgctgatctacgcagcatctagcctgcagtctggagtgccctcccggttctctggaagaggatccggaaccgacttcaccctgacaatctcctctctgcaggccgaggacttcgccacatactattgccagcagagctattccatccctcagacctttggccagggcacaaagctggagatcaagggcggcggcggctctggaggaggaggaagcggaggaggaggatcccaggtgcagctgcagcagagcggaccaggactggtgaagccctcccagaccctgtctctgacatgtgccatcagcggcgattccgtgagctccaacagcgccgcctggaattggatccggcagtctcccagcagaggactggagtggctgggaaggacctactatcgctccaagtggtacaacgattatgccgtgtctgtgaagagccggatcaccatcaaccctgacacatctaagaatcagttcagcctgcagctgaattccgtgaccccagaggacacagccgtgtactattgtgcaagggaggtgaccggcgacctggaggatgcctttgacatctggggccagggcaccatggtgacagtgtctagcaccacgacgccagcgccgcgaccaccaacaccggcgcccaccatcgcgtcgcagcccctgtccctgcgcccagaggcgtgccggccagcggcggggggcgcagtgcacacgagggggctggacttcgcctgtgatatctacatctgggcgcccttggccgggacttgtggggtccttctcctgtcactggttatcaccctttactgcaaacggggcagaaagaaactcctgtatatattcaaacaaccatttatgagaccagtacaaactactcaagaggaagatggctgtagctgccgatttccagaagaagaagaaggaggatgtgaactgagagtgaagttcagcaggagcgcagacgcccccgcgtacaagcagggccagaaccagctctataacgagctcaatctaggacgaagagaggagtacgatgttttggacaagaggcgtggccgggaccctgagatggggggaaagccgagaaggaagaaccctcaggaaggcctgtacaatgaactgcagaaagataagatggcggaggcctacagtgagattgggatgaaaggcgagcgccggaggggcaaggggcacgatggcctttaccagggtctcagtacagccaccaaggacacctacgacgcccttcacatgcaggccctgccccctcgctaa

SEQ ID NO: 232 - DNA, 3536 bp, Artificial Sequence
  Synthesized
atggccttaccagtgaccgccttgctcctgccgctggccttgctgctccacgccgccaggccggacatcgtgatgacccagtccccctccagcctgacagtgacagccggcgagaaggtgacaatgatctgtaagtccagccagagcctgctgaacagcggcgaccagaagaactacctgacctggtaccagcagaagcctggccagccccccaagctgctgatcttctgggccagcacaagggagagcggcgtgcccgacagattcacaggcagcggcagcggcaccgacttcacactgaccatttcctccgtgcaggccgaggacctcgccgtgtactactgccagaacgactactcctaccccctgacattcggcgccggcaccaaactggagctgaagggtggcggtggctcgggcggtggtgggtcgggtggcggcggatctcaggtgcagctccagcagtccgatgccgagctggtgaagcccggaagcagcgtcaagatcagctgtaaggcctccggctacaccttcacagaccacgccatccactgggtgaagcagaagcccgagcagggcctggagtggatcggccactttagccccggaaacaccgacatcaagtacaacgacaagttcaagggcaaggccaccctgaccgtggacaggagcagcagcaccgcctacatgcagctgaacagcctgacaagcgaggacagcgccgtgtacttctgcaagacctccaccttcttcttcgactactggggccagggaaccaccctgacagtgtccagcaccacgacgccagcgccgcgaccaccaacaccggcgcccaccatcgcgtcgcagcccctgtccctgcgcccagaggcgtgccggccagcggcggggggcgcagtgcacacgagggggctggacttcgcctgtgatatctacatctgggcgcccttggccgggacttgtggggtccttctcctgtcactggttatcaccaaacggggcagaaagaaactcctgtatatattcaaacaaccatttatgagaccagtacaaactactcaagaggaagatggctgtagctgccgatttccagaagaagaagaaggaggatgtgaactgagagtgaagttcagcaggagcgcagacgcccccgcgtacaagcagggccagaaccagctctataacgagctcaatctaggacgaagagaggagtacgatgttttggacaagaggcgtggccgggaccctgagatggggggaaagccgagaaggaagaaccctcaggaaggcctgtacaatgaactgcagaaagataagatggcggaggcctacagtgagattgggatgaaaggcgagcgccggaggggcaaggggcacgatggcctttaccagggtctcagtacagccaccaaggacacctacgacgcccttcacatgcaggccctgccccctcgctaatctagaggcgcgcccctctccctcccccccccctaacgttactggccgaagccgcttggaataaggccggtgtgcgtttgtctatatgttattttccaccatattgccgtcttttggcaatgtgagggcccggaaacctggccctgtcttcttgacgagcattcctaggggtctttcccctctcgccaaaggaatgcaaggtctgttgaatgtcgtgaaggaagcagttcctctggaagcttcttgaagacaaacaacgtctgtagcgaccctttgcaggcagcggaaccccccacctggcgacaggtgcctctgcggccaaaagccacgtgtataagatacacctgcaaaggcggcacaaccccagtgccacgttgtgagttggatagttgtggaaagagtcaaatggctctcctcaagcgtattcaacaaggggctgaaggatgcccagaaggtaccccattgtatgggatctgatctggggcctcggtacacatgctttacatgtgtttagtcgaggttaaaaaaacgtctaggccccccgaaccacggggacgtggttttcctttgaaaaacacgatgataatatggccacaacccatatgatggccttaccagtgaccgccttgctcctgccgctggccttgctgctccacgccgccaggccggatatccagatgacccagagcccaagctccctgtccgcctctgtgggcgacagggtgaccatcacatgccgcgccagccagacaatctggtcctacctgaactggtatcagcagagacccggcaaggcccctaatctgctgatctacgcagcatctagcctgcagtctggagtgccctcccggttctctggaagaggatccggaaccgacttcaccctgacaatctcctctctgcaggccgaggacttcgccacatactattgccagcagagctattccatccctcagacctttggccagggcacaaagctggagatcaagggcggcggcggctctggaggaggaggaagcggaggaggaggatcccaggtgcagctgcagcagagcggaccaggactggtgaagccctcccagaccctgtctctgacatgtgccatcagcggcgattccgtgagctccaacagcgccgcctggaattggatccggcagtctcccagcagaggactggagtggctgggaaggacctactatcgctccaagtggtacaacgattatgccgtgtctgtgaagagccggatcaccatcaaccctgacacatctaagaatcagttcagcctgcagctgaattccgtgaccccagaggacacagccgtgtactattgtgcaagggaggtgaccggcgacctggaggatgcctttgacatctggggccagggcaccatggtgacagtgtctagcaccacgacgccagcgccgcgaccaccaacaccggcgcccaccatcgcgtcgcagcccctgtccctgcgcccagaggcgtgccggccagcggcggggggcgcagtgcacacgagggggctggacttcgcctgtgatatctacatctgggcgcccttggccgggacttgtggggtccttctcctgtcactggttatcaccctttactgcaaacggggcagaaagaaactcctgtatatattcaaacaaccatttatgagaccagtacaaactactcaagaggaagatggctgtagctgccgatttccagaagaagaagaaggaggatgtgaactgagagtgaagttcagcaggagcgcagacgcccccgcgtacaagcagggccagaaccagctctataacgagctcaatctaggacgaagagaggagtacgatgttttggacaagaggcgtggccgggaccctgagatggggggaaagccgagaaggaagaaccctcaggaaggcctgtacaatgaactgcagaaagataagatggcggaggcctacagtgagattgggatgaaaggcgagcgccggaggggcaaggggcacgatggcctttaccagggtctcagtacagccaccaaggacacctacgacgcccttcacatgcaggccctgccccctcgctaa

SEQ ID NO: 233 - DNA, 3536 bp, Artificial Sequence
  Synthesized
atggccttaccagtgaccgccttgctcctgccgctggccttgctgctccacgccgccaggccggacatcgtgatgacccagtccccctccagcctgacagtgacagccggcgagaaggtgacaatgatctgtaagtccagccagagcctgctgaacagcggcgaccagaagaactacctgacctggtaccagcagaagcctggccagccccccaagctgctgatcttctgggccagcacaagggagagcggcgtgcccgacagattcacaggcagcggcagcggcaccgacttcacactgaccatttcctccgtgcaggccgaggacctcgccgtgtactactgccagaacgactactcctaccccctgacattcggcgccggcaccaaactggagctgaagggtggcggtggctcgggcggtggtgggtcgggtggcggcggatctcaggtgcagctccagcagtccgatgccgagctggtgaagcccggaagcagcgtcaagatcagctgtaaggcctccggctacaccttcacagaccacgccatccactgggtgaagcagaagcccgagcagggcctggagtggatcggccactttagccccggaaacaccgacatcaagtacaacgacaagttcaagggcaaggccaccctgaccgtggacaggagcagcagcaccgcctacatgcagctgaacagcctgacaagcgaggacagcgccgtgtacttctgcaagacctccaccttcttcttcgactactggggccagggaaccaccctgacagtgtccagcaccacgacgccagcgccgcgaccaccaacaccggcgcccaccatcgcgtcgcagcccctgtccctgcgcccagaggcgtgccggccagcggcggggggcgcagtgcacacgagggggctggacttcgcctgtgatatctacatctgggcgcccttggccgggacttgtggggtccttctcctgtcactggttatcaccctttactgcaaacggggcagaaagaaactcctgtatatattcaaacaaccatttatgagaccagtacaaactactcaagaggaagatggctgtagctgccgatttccagaagaagaagaaggaggatgtgaactgagagtgaagttcagcaggagcgcagacgcccccgcgtacaagcagggccagaaccagctctataacgagctcaatctaggacgaagagaggagtacgatgttttggacaagaggcgtggccgggaccctgagatggggggaaagccgagaaggaagaaccctcaggaaggcctgtacaatgaactgcagaaagataagatggcggaggcctacagtgagattgggatgaaaggcgagcgccggaggggcaaggggcacgatggcctttaccagggtctcagtacagccaccaaggacacctacgacgcccttcacatgcaggccctgccccctcgctaatctagaggcgcgcccctctccctcccccccccctaacgttactggccgaagccgcttggaataaggccggtgtgcgtttgtctatatgttattttccaccatattgccgtcttttggcaatgtgagggcccggaaacctggccctgtcttcttgacgagcattcctaggggtctttcccctctcgccaaaggaatgcaaggtctgttgaatgtcgtgaaggaagcagttcctctggaagcttcttgaagacaaacaacgtctgtagcgaccctttgcaggcagcggaaccccccacctggcgacaggtgcctctgcggccaaaagccacgtgtataagatacacctgcaaaggcggcacaaccccagtgccacgttgtgagttggatagttgtggaaagagtcaaatggctctcctcaagcgtattcaacaaggggctgaaggatgcccagaaggtaccccattgtatgggatctgatctggggcctcggtacacatgctttacatgtgtttagtcgaggttaaaaaaacgtctaggccccccgaaccacggggacgtggttttcctttgaaaaacacgatgataatatggccacaacccatatgatggccttaccagtgaccgccttgctcctgccgctggccttgctgctccacgccgccaggccggatatccagatgacccagagcccaagctccctgtccgcctctgtgggcgacagggtgaccatcacatgccgcgccagccagacaatctggtcctacctgaactggtatcagcagagacccggcaaggcccctaatctgctgatctacgcagcatctagcctgcagtctggagtgccctcccggttctctggaagaggatccggaaccgacttcaccctgacaatctcctctctgcaggccgaggacttcgccacatactattgccagcagagctattccatccctcagacctttggccagggcacaaagctggagatcaagggcggcggcggctctggaggaggaggaagcggaggaggaggatcccaggtgcagctgcagcagagcggaccaggactggtgaagccctcccagaccctgtctctgacatgtgccatcagcggcgattccgtgagctccaacagcgccgcctggaattggatccggcagtctcccagcagaggactggagtggctgggaaggacctactatcgctccaagtggtacaacgattatgccgtgtctgtgaagagccggatcaccatcaaccctgacacatctaagaatcagttcagcctgcagctgaattccgtgaccccagaggacacagccgtgtactattgtgcaagggaggtgaccggcgacctggaggatgcctttgacatctggggccagggcaccatggtgacagtgtctagcaccacgacgccagcgccgcgaccaccaacaccggcgcccaccatcgcgtcgcagcccctgtccctgcgcccagaggcgtgccggccagcggcggggggcgcagtgcacacgagggggctggacttcgcctgtgatatctacatctgggcgcccttggccgggacttgtggggtccttctcctgtcactggttatcaccaaacggggcagaaagaaactcctgtatatattcaaacaaccatttatgagaccagtacaaactactcaagaggaagatggctgtagctgccgatttccagaagaagaagaaggaggatgtgaactgagagtgaagttcagcaggagcgcagacgcccccgcgtacaagcagggccagaaccagctctataacgagctcaatctaggacgaagagaggagtacgatgttttggacaagaggcgtggccgggaccctgagatggggggaaagccgagaaggaagaaccctcaggaaggcctgtacaatgaactgcagaaagataagatggcggaggcctacagtgagattgggatgaaaggcgagcgccggaggggcaaggggcacgatggcctttaccagggtctcagtacagccaccaaggacacctacgacgcccttcacatgcaggccctgccccctcgctaa

SEQ ID NO: 234 - DNA, 3527 bp, Artificial Sequence
  Synthesized
atggccttaccagtgaccgccttgctcctgccgctggccttgctgctccacgccgccaggccggacatcgtgatgacccagtccccctccagcctgacagtgacagccggcgagaaggtgacaatgatctgtaagtccagccagagcctgctgaacagcggcgaccagaagaactacctgacctggtaccagcagaagcctggccagccccccaagctgctgatcttctgggccagcacaagggagagcggcgtgcccgacagattcacaggcagcggcagcggcaccgacttcacactgaccatttcctccgtgcaggccgaggacctcgccgtgtactactgccagaacgactactcctaccccctgacattcggcgccggcaccaaactggagctgaagggtggcggtggctcgggcggtggtgggtcgggtggcggcggatctcaggtgcagctccagcagtccgatgccgagctggtgaagcccggaagcagcgtcaagatcagctgtaaggcctccggctacaccttcacagaccacgccatccactgggtgaagcagaagcccgagcagggcctggagtggatcggccactttagccccggaaacaccgacatcaagtacaacgacaagttcaagggcaaggccaccctgaccgtggacaggagcagcagcaccgcctacatgcagctgaacagcctgacaagcgaggacagcgccgtgtacttctgcaagacctccaccttcttcttcgactactggggccagggaaccaccctgacagtgtccagcaccacgacgccagcgccgcgaccaccaacaccggcgcccaccatcgcgtcgcagcccctgtccctgcgcccagaggcgtgccggccagcggcggggggcgcagtgcacacgagggggctggacttcgcctgtgatatctacatctgggcgcccttggccgggacttgtggggtccttctcctgtcactggttatcaccaaacggggcagaaagaaactcctgtatatattcaaacaaccatttatgagaccagtacaaactactcaagaggaagatggctgtagctgccgatttccagaagaagaagaaggaggatgtgaactgagagtgaagttcagcaggagcgcagacgcccccgcgtacaagcagggccagaaccagctctataacgagctcaatctaggacgaagagaggagtacgatgttttggacaagaggcgtggccgggaccctgagatggggggaaagccgagaaggaagaaccctcaggaaggcctgtacaatgaactgcagaaagataagatggcggaggcctacagtgagattgggatgaaaggcgagcgccggaggggcaaggggcacgatggcctttaccagggtctcagtacagccaccaaggacacctacgacgcccttcacatgcaggccctgccccctcgctaatctagaggcgcgcccctctccctcccccccccctaacgttactggccgaagccgcttggaataaggccggtgtgcgtttgtctatatgttattttccaccatattgccgtcttttggcaatgtgagggcccggaaacctggccctgtcttcttgacgagcattcctaggggtctttcccctctcgccaaaggaatgcaaggtctgttgaatgtcgtgaaggaagcagttcctctggaagcttcttgaagacaaacaacgtctgtagcgaccctttgcaggcagcggaaccccccacctggcgacaggtgcctctgcggccaaaagccacgtgtataagatacacctgcaaaggcggcacaaccccagtgccacgttgtgagttggatagttgtggaaagagtcaaatggctctcctcaagcgtattcaacaaggggctgaaggatgcccagaaggtaccccattgtatgggatctgatctggggcctcggtacacatgctttacatgtgtttagtcgaggttaaaaaaacgtctaggccccccgaaccacggggacgtggttttcctttgaaaaacacgatgataatatggccacaacccatatgatggccttaccagtgaccgccttgctcctgccgctggccttgctgctccacgccgccaggccggatatccagatgacccagagcccaagctccctgtccgcctctgtgggcgacagggtgaccatcacatgccgcgccagccagacaatctggtcctacctgaactggtatcagcagagacccggcaaggcccctaatctgctgatctacgcagcatctagcctgcagtctggagtgccctcccggttctctggaagaggatccggaaccgacttcaccctgacaatctcctctctgcaggccgaggacttcgccacatactattgccagcagagctattccatccctcagacctttggccagggcacaaagctggagatcaagggcggcggcggctctggaggaggaggaagcggaggaggaggatcccaggtgcagctgcagcagagcggaccaggactggtgaagccctcccagaccctgtctctgacatgtgccatcagcggcgattccgtgagctccaacagcgccgcctggaattggatccggcagtctcccagcagaggactggagtggctgggaaggacctactatcgctccaagtggtacaacgattatgccgtgtctgtgaagagccggatcaccatcaaccctgacacatctaagaatcagttcagcctgcagctgaattccgtgaccccagaggacacagccgtgtactattgtgcaagggaggtgaccggcgacctggaggatgcctttgacatctggggccagggcaccatggtgacagtgtctagcaccacgacgccagcgccgcgaccaccaacaccggcgcccaccatcgcgtcgcagcccctgtccctgcgcccagaggcgtgccggccagcggcggggggcgcagtgcacacgagggggctggacttcgcctgtgatatctacatctgggcgcccttggccgggacttgtggggtccttctcctgtcactggttatcaccaaacggggcagaaagaaactcctgtatatattcaaacaaccatttatgagaccagtacaaactactcaagaggaagatggctgtagctgccgatttccagaagaagaagaaggaggatgtgaactgagagtgaagttcagcaggagcgcagacgcccccgcgtacaagcagggccagaaccagctctataacgagctcaatctaggacgaagagaggagtacgatgttttggacaagaggcgtggccgggaccctgagatggggggaaagccgagaaggaagaaccctcaggaaggcctgtacaatgaactgcagaaagataagatggcggaggcctacagtgagattgggatgaaaggcgagcgccggaggggcaaggggcacgatggcctttaccagggtctcagtacagccaccaaggacacctacgacgcccttcacatgcaggccctgccccctcgctaa

SEQ ID NO: 235 - DNA, 3665 bp, Artificial Sequence
  Synthesized
atggccttaccagtgaccgccttgctcctgccgctggccttgctgctccacgccgccaggccggatattgtgatgacccagtccccgtcctccctgaccgtgaccgcgggcgaaaaagtgaccatgatttgcaaatcctcccagtccctgctgaattccggcgatcagaaaaattatctgacctggtatcagcagaaaccgggccagccgccgaaactgctgattttttgggcgtccacccgtgaatccggcgtgccggatcgttttaccggctccggctccggcaccgattttaccctgaccatttcctccgtgcaggcggaagatctggcggtgtattattgccagaatgattattcctatccgctgacctttggcgcgggcaccaaactggaactgaaaggcggcggcggctccggcggcggcggctccggcggcggcggctcccaggtgcagctgcagcagtccgatgcggaactggtgaaaccgggctcctccgtgaaaatttcctgcaaagcgtccggctatacctttaccgatcatgcgattcattgggtgaaacagaaaccggaacagggcctggaatggattggccatttttccccgggcaataccgatattaaatataatgataaatttaaaggcaaagcgaccctgaccgtggatcgttcctcctccaccgcgtatatgcagctgaattccctgacctccgaagattccgcggtgtatttttgcaaaacctccacctttttttttgattattggggccagggcaccaccctgaccgtgtcctccaccacgacgccagcgccgcgaccaccaacaccggcgcccaccatcgcgtcgcagcccctgtccctgcgcccagaggcgtgccggccagcggcggggggcgcagtgcacacgagggggctggacttcgcctgtgatatctacatctgggcgcccttggccgggacttgtggggtccttctcctgtcactggttatcaccctttactgcaaacggggcagaaagaaactcctgtatatattcaaacaaccatttatgagaccagtacaaactactcaagaggaagatggctgtagctgccgatttccagaagaagaagaaggaggatgtgaactgagagtgaagttcagcaggagcgcagacgcccccgcgtacaagcagggccagaaccagctctataacgagctcaatctaggacgaagagaggagtacgatgttttggacaagaggcgtggccgggaccctgagatggggggaaagccgagaaggaagaaccctcaggaaggcctgtacaatgaactgcagaaagataagatggcggaggcctacagtgagattgggatgaaaggcgagcgccggaggggcaaggggcacgatggcctttaccagggtctcagtacagccaccaaggacacctacgacgcccttcacatgcaggccctgccccctcgctaatctagaggcgcgcccctctccctcccccccccctaacgttactggccgaagccgcttggaataaggccggtgtgcgtttgtctatatgttattttccaccatattgccgtcttttggcaatgtgagggcccggaaacctggccctgtcttcttgacgagcattcctaggggtctttcccctctcgccaaaggaatgcaaggtctgttgaatgtcgtgaaggaagcagttcctctggaagcttcttgaagacaaacaacgtctgtagcgaccctttgcaggcagcggaaccccccacctggcgacaggtgcctctgcggccaaaagccacgtgtataagatacacctgcaaaggcggcacaaccccagtgccacgttgtgagttggatagttgtggaaagagtcaaatggctctcctcaagcgtattcaacaaggggctgaaggatgcccagaaggtaccccattgtatgggatctgatctggggcctcggtacacatgctttacatgtgtttagtcgaggttaaaaaaacgtctaggccccccgaaccacggggacgtggttttcctttgaaaaacacgatgataatatggccacaacccatatgatggccttaccagtgaccgccttgctcctgccgctggccttgctgctccacgccgccaggccgatgggctggtcctgcatcatcctgttcctggtggccaccgccaccggcgtgcactccaacatcgtgctgacccagtcccccgcctccctggccgtgtccctgggccagcgggccaccatctcctgccgggcctccgagtccgtggactcctacggcaactccttcatgcactggtaccagcagaagcccggccagccccccaagctgctgatctacctggcctccaacctggagtccggcgtgcccgcccggttctccggctccggctcccggaccgacttcaccctgaccatcgaccccgtggaggccgacgacgtggccacctactactgccagcagaacaacggcgacccctacaccttcggcggcggcaccaagctggagatcatccggggcggcggcggctccggcggcggcggctccggcggcggcggctccatgggctggtcctgcatcatcctgttcctggtggccaccgccaccggcgtgcactccgaggtgcagctggtggagtccggcggcggcctgatgcagcccaagggctccctgaagctgtcctgcgccgcctccggcttcaccttcaagacctacgccctgaactgggtgcggcaggcccccggcaccggcctggagtgggtggcccggatccggtccaagtccaacaactacaccacctactacgccgactccgtgaaggaccggttcaccatctcccgggacgactcccagaacatgctgtacctgcagatgaacaacctgaagaccgaggacaccgccatgtactactgcgtgcggccccagtccggcacctccttcgcctactggggccagggcaccctggtgaccgtgtccgccgccaccacgacgccagcgccgcgaccaccaacaccggcgcccaccatcgcgtcgcagcccctgtccctgcgcccagaggcgtgccggccagcggcggggggcgcagtgcacacgagggggctggacttcgcctgtgatatctacatctgggcgcccttggccgggacttgtggggtccttctcctgtcactggttatcaccctttactgcaaacggggcagaaagaaactcctgtatatattcaaacaaccatttatgagaccagtacaaactactcaagaggaagatggctgtagctgccgatttccagaagaagaagaaggaggatgtgaactgagagtgaagttcagcaggagcgcagacgcccccgcgtacaagcagggccagaaccagctctataacgagctcaatctaggacgaagagaggagtacgatgttttggacaagaggcgtggccgggaccctgagatggggggaaagccgagaaggaagaaccctcaggaaggcctgtacaatgaactgcagaaagataagatggcggaggcctacagtgagattgggatgaaaggcgagcgccggaggggcaaggggcacgatggcctttaccagggtctcagtacagccaccaaggacacctacgacgcccttcacatgcaggccctgccccctcgctaa

SEQ ID NO: 236 - protein, 530 aa, Artificial Sequence
  Synthesized
MALPVTALLLPLALLLHAARPMGWSCIILFLVATATGVHSNIVLTQSPASLAVSLGQRATISCRASESVDSYGNSFMHWYQQKPGQPPKLLIYLASNLESGVPARFSGSGSRTDFTLTIDPVEADDVATYYCQQNNGDPYTFGGGTKLEIIRGGGGSGGGGSGGGGSMGWSCIILFLVATATGVHSEVQLVESGGGLMQPKGSLKLSCAASGFTFKTYALNWVRQAPGTGLEWVARIRSKSNNYTTYYADSVKDRFTISRDDSQNMLYLQMNNLKTEDTAMYYCVRPQSGTSFAYWGQGTLVTVSAATTTPAPRPPTPAPTIASQPLSLRPEACRPAAGGAVHTRGLDFACDIYIWAPLAGTCGVLLLSLVITLYCKRGRKKLLYIFKQPFMRPVQTTQEEDGCSCRFPEEEEGGCELRVKFSRSADAPAYQQGQNQLYNELNLGRREEYDVLDKRRGRDPEMGGKPRRKNPQEGLYNELQKDKMAEAYSEIGMKGERRRGKGHDGLYQGLSTATKDTYDALHMQALPPR

SEQ ID NO: 237 - DNA, 3656 bp, Artificial Sequence
  Synthesized
atggccttaccagtgaccgccttgctcctgccgctggccttgctgctccacgccgccaggccggatattgtgatgacccagtccccgtcctccctgaccgtgaccgcgggcgaaaaagtgaccatgatttgcaaatcctcccagtccctgctgaattccggcgatcagaaaaattatctgacctggtatcagcagaaaccgggccagccgccgaaactgctgattttttgggcgtccacccgtgaatccggcgtgccggatcgttttaccggctccggctccggcaccgattttaccctgaccatttcctccgtgcaggcggaagatctggcggtgtattattgccagaatgattattcctatccgctgacctttggcgcgggcaccaaactggaactgaaaggcggcggcggctccggcggcggcggctccggcggcggcggctcccaggtgcagctgcagcagtccgatgcggaactggtgaaaccgggctcctccgtgaaaatttcctgcaaagcgtccggctatacctttaccgatcatgcgattcattgggtgaaacagaaaccggaacagggcctggaatggattggccatttttccccgggcaataccgatattaaatataatgataaatttaaaggcaaagcgaccctgaccgtggatcgttcctcctccaccgcgtatatgcagctgaattccctgacctccgaagattccgcggtgtatttttgcaaaacctccacctttttttttgattattggggccagggcaccaccctgaccgtgtcctccaccacgacgccagcgccgcgaccaccaacaccggcgcccaccatcgcgtcgcagcccctgtccctgcgcccagaggcgtgccggccagcggcggggggcgcagtgcacacgagggggctggacttcgcctgtgatatctacatctgggcgcccttggccgggacttgtggggtccttctcctgtcactggttatcaccaaacggggcagaaagaaactcctgtatatattcaaacaaccatttatgagaccagtacaaactactcaagaggaagatggctgtagctgccgatttccagaagaagaagaaggaggatgtgaactgagagtgaagttcagcaggagcgcagacgcccccgcgtacaagcagggccagaaccagctctataacgagctcaatctaggacgaagagaggagtacgatgttttggacaagaggcgtggccgggaccctgagatggggggaaagccgagaaggaagaaccctcaggaaggcctgtacaatgaactgcagaaagataagatggcggaggcctacagtgagattgggatgaaaggcgagcgccggaggggcaaggggcacgatggcctttaccagggtctcagtacagccaccaaggacacctacgacgcccttcacatgcaggccctgccccctcgctaatctagaggcgcgcccctctccctcccccccccctaacgttactggccgaagccgcttggaataaggccggtgtgcgtttgtctatatgttattttccaccatattgccgtcttttggcaatgtgagggcccggaaacctggccctgtcttcttgacgagcattcctaggggtctttcccctctcgccaaaggaatgcaaggtctgttgaatgtcgtgaaggaagcagttcctctggaagcttcttgaagacaaacaacgtctgtagcgaccctttgcaggcagcggaaccccccacctggcgacaggtgcctctgcggccaaaagccacgtgtataagatacacctgcaaaggcggcacaaccccagtgccacgttgtgagttggatagttgtggaaagagtcaaatggctctcctcaagcgtattcaacaaggggctgaaggatgcccagaaggtaccccattgtatgggatctgatctggggcctcggtacacatgctttacatgtgtttagtcgaggttaaaaaaacgtctaggccccccgaaccacggggacgtggttttcctttgaaaaacacgatgataatatggccacaacccatatgatggccttaccagtgaccgccttgctcctgccgctggccttgctgctccacgccgccaggccgatgggctggtcctgcatcatcctgttcctggtggccaccgccaccggcgtgcactccaacatcgtgctgacccagtcccccgcctccctggccgtgtccctgggccagcgggccaccatctcctgccgggcctccgagtccgtggactcctacggcaactccttcatgcactggtaccagcagaagcccggccagccccccaagctgctgatctacctggcctccaacctggagtccggcgtgcccgcccggttctccggctccggctcccggaccgacttcaccctgaccatcgaccccgtggaggccgacgacgtggccacctactactgccagcagaacaacggcgacccctacaccttcggcggcggcaccaagctggagatcatccggggcggcggcggctccggcggcggcggctccggcggcggcggctccatgggctggtcctgcatcatcctgttcctggtggccaccgccaccggcgtgcactccgaggtgcagctggtggagtccggcggcggcctgatgcagcccaagggctccctgaagctgtcctgcgccgcctccggcttcaccttcaagacctacgccctgaactgggtgcggcaggcccccggcaccggcctggagtgggtggcccggatccggtccaagtccaacaactacaccacctactacgccgactccgtgaaggaccggttcaccatctcccgggacgactcccagaacatgctgtacctgcagatgaacaacctgaagaccgaggacaccgccatgtactactgcgtgcggccccagtccggcacctccttcgcctactggggccagggcaccctggtgaccgtgtccgccgccaccacgacgccagcgccgcgaccaccaacaccggcgcccaccatcgcgtcgcagcccctgtccctgcgcccagaggcgtgccggccagcggcggggggcgcagtgcacacgagggggctggacttcgcctgtgatatctacatctgggcgcccttggccgggacttgtggggtccttctcctgtcactggttatcaccctttactgcaaacggggcagaaagaaactcctgtatatattcaaacaaccatttatgagaccagtacaaactactcaagaggaagatggctgtagctgccgatttccagaagaagaagaaggaggatgtgaactgagagtgaagttcagcaggagcgcagacgcccccgcgtacaagcagggccagaaccagctctataacgagctcaatctaggacgaagagaggagtacgatgttttggacaagaggcgtggccgggaccctgagatggggggaaagccgagaaggaagaaccctcaggaaggcctgtacaatgaactgcagaaagataagatggcggaggcctacagtgagattgggatgaaaggcgagcgccggaggggcaaggggcacgatggcctttaccagggtctcagtacagccaccaaggacacctacgacgcccttcacatgcaggccctgccccctcgctaa

SEQ ID NO: 238 - DNA, 3656 bp, Artificial Sequence
  Synthesized
atggccttaccagtgaccgccttgctcctgccgctggccttgctgctccacgccgccaggccggatattgtgatgacccagtccccgtcctccctgaccgtgaccgcgggcgaaaaagtgaccatgatttgcaaatcctcccagtccctgctgaattccggcgatcagaaaaattatctgacctggtatcagcagaaaccgggccagccgccgaaactgctgattttttgggcgtccacccgtgaatccggcgtgccggatcgttttaccggctccggctccggcaccgattttaccctgaccatttcctccgtgcaggcggaagatctggcggtgtattattgccagaatgattattcctatccgctgacctttggcgcgggcaccaaactggaactgaaaggcggcggcggctccggcggcggcggctccggcggcggcggctcccaggtgcagctgcagcagtccgatgcggaactggtgaaaccgggctcctccgtgaaaatttcctgcaaagcgtccggctatacctttaccgatcatgcgattcattgggtgaaacagaaaccggaacagggcctggaatggattggccatttttccccgggcaataccgatattaaatataatgataaatttaaaggcaaagcgaccctgaccgtggatcgttcctcctccaccgcgtatatgcagctgaattccctgacctccgaagattccgcggtgtatttttgcaaaacctccacctttttttttgattattggggccagggcaccaccctgaccgtgtcctccaccacgacgccagcgccgcgaccaccaacaccggcgcccaccatcgcgtcgcagcccctgtccctgcgcccagaggcgtgccggccagcggcggggggcgcagtgcacacgagggggctggacttcgcctgtgatatctacatctgggcgcccttggccgggacttgtggggtccttctcctgtcactggttatcaccctttactgcaaacggggcagaaagaaactcctgtatatattcaaacaaccatttatgagaccagtacaaactactcaagaggaagatggctgtagctgccgatttccagaagaagaagaaggaggatgtgaactgagagtgaagttcagcaggagcgcagacgcccccgcgtacaagcagggccagaaccagctctataacgagctcaatctaggacgaagagaggagtacgatgttttggacaagaggcgtggccgggaccctgagatggggggaaagccgagaaggaagaaccctcaggaaggcctgtacaatgaactgcagaaagataagatggcggaggcctacagtgagattgggatgaaaggcgagcgccggaggggcaaggggcacgatggcctttaccagggtctcagtacagccaccaaggacacctacgacgcccttcacatgcaggccctgccccctcgctaatctagaggcgcgcccctctccctcccccccccctaacgttactggccgaagccgcttggaataaggccggtgtgcgtttgtctatatgttattttccaccatattgccgtcttttggcaatgtgagggcccggaaacctggccctgtcttcttgacgagcattcctaggggtctttcccctctcgccaaaggaatgcaaggtctgttgaatgtcgtgaaggaagcagttcctctggaagcttcttgaagacaaacaacgtctgtagcgaccctttgcaggcagcggaaccccccacctggcgacaggtgcctctgcggccaaaagccacgtgtataagatacacctgcaaaggcggcacaaccccagtgccacgttgtgagttggatagttgtggaaagagtcaaatggctctcctcaagcgtattcaacaaggggctgaaggatgcccagaaggtaccccattgtatgggatctgatctggggcctcggtacacatgctttacatgtgtttagtcgaggttaaaaaaacgtctaggccccccgaaccacggggacgtggttttcctttgaaaaacacgatgataatatggccacaacccatatgatggccttaccagtgaccgccttgctcctgccgctggccttgctgctccacgccgccaggccgatgggctggtcctgcatcatcctgttcctggtggccaccgccaccggcgtgcactccaacatcgtgctgacccagtcccccgcctccctggccgtgtccctgggccagcgggccaccatctcctgccgggcctccgagtccgtggactcctacggcaactccttcatgcactggtaccagcagaagcccggccagccccccaagctgctgatctacctggcctccaacctggagtccggcgtgcccgcccggttctccggctccggctcccggaccgacttcaccctgaccatcgaccccgtggaggccgacgacgtggccacctactactgccagcagaacaacggcgacccctacaccttcggcggcggcaccaagctggagatcatccggggcggcggcggctccggcggcggcggctccggcggcggcggctccatgggctggtcctgcatcatcctgttcctggtggccaccgccaccggcgtgcactccgaggtgcagctggtggagtccggcggcggcctgatgcagcccaagggctccctgaagctgtcctgcgccgcctccggcttcaccttcaagacctacgccctgaactgggtgcggcaggcccccggcaccggcctggagtgggtggcccggatccggtccaagtccaacaactacaccacctactacgccgactccgtgaaggaccggttcaccatctcccgggacgactcccagaacatgctgtacctgcagatgaacaacctgaagaccgaggacaccgccatgtactactgcgtgcggccccagtccggcacctccttcgcctactggggccagggcaccctggtgaccgtgtccgccgccaccacgacgccagcgccgcgaccaccaacaccggcgcccaccatcgcgtcgcagcccctgtccctgcgcccagaggcgtgccggccagcggcggggggcgcagtgcacacgagggggctggacttcgcctgtgatatctacatctgggcgcccttggccgggacttgtggggtccttctcctgtcactggttatcaccaaacggggcagaaagaaactcctgtatatattcaaacaaccatttatgagaccagtacaaactactcaagaggaagatggctgtagctgccgatttccagaagaagaagaaggaggatgtgaactgagagtgaagttcagcaggagcgcagacgcccccgcgtacaagcagggccagaaccagctctataacgagctcaatctaggacgaagagaggagtacgatgttttggacaagaggcgtggccgggaccctgagatggggggaaagccgagaaggaagaaccctcaggaaggcctgtacaatgaactgcagaaagataagatggcggaggcctacagtgagattgggatgaaaggcgagcgccggaggggcaaggggcacgatggcctttaccagggtctcagtacagccaccaaggacacctacgacgcccttcacatgcaggccctgccccctcgctaa

SEQ ID NO: 239 - protein, 527 aa, Artificial Sequence
  Synthesized
MALPVTALLLPLALLLHAARPMGWSCIILFLVATATGVHSNIVLTQSPASLAVSLGQRATISCRASESVDSYGNSFMHWYQQKPGQPPKLLIYLASNLESGVPARFSGSGSRTDFTLTIDPVEADDVATYYCQQNNGDPYTFGGGTKLEIIRGGGGSGGGGSGGGGSMGWSCIILFLVATATGVHSEVQLVESGGGLMQPKGSLKLSCAASGFTFKTYALNWVRQAPGTGLEWVARIRSKSNNYTTYYADSVKDRFTISRDDSQNMLYLQMNNLKTEDTAMYYCVRPQSGTSFAYWGQGTLVTVSAATTTPAPRPPTPAPTIASQPLSLRPEACRPAAGGAVHTRGLDFACDIYIWAPLAGTCGVLLLSLVITKRGRKKLLYIFKQPFMRPVQTTQEEDGCSCRFPEEEEGGCELRVKFSRSADAPAYQQGQNQLYNELNLGRREEYDVLDKRRGRDPEMGGKPRRKNPQEGLYNELQKDKMAEAYSEIGMKGERRRGKGHDGLYQGLSTATKDTYDALHMQALPPR

SEQ ID NO: 240 - DNA, 3665 bp, Artificial Sequence
  Synthesized
atggccttaccagtgaccgccttgctcctgccgctggccttgctgctccacgccgccaggccggacatcgtgatgacccagtccccctccagcctgacagtgacagccggcgagaaggtgacaatgatctgtaagtccagccagagcctgctgaacagcggcgaccagaagaactacctgacctggtaccagcagaagcctggccagccccccaagctgctgatcttctgggccagcacaagggagagcggcgtgcccgacagattcacaggcagcggcagcggcaccgacttcacactgaccatttcctccgtgcaggccgaggacctcgccgtgtactactgccagaacgactactcctaccccctgacattcggcgccggcaccaaactggagctgaagggtggcggtggctcgggcggtggtgggtcgggtggcggcggatctcaggtgcagctccagcagtccgatgccgagctggtgaagcccggaagcagcgtcaagatcagctgtaaggcctccggctacaccttcacagaccacgccatccactgggtgaagcagaagcccgagcagggcctggagtggatcggccactttagccccggaaacaccgacatcaagtacaacgacaagttcaagggcaaggccaccctgaccgtggacaggagcagcagcaccgcctacatgcagctgaacagcctgacaagcgaggacagcgccgtgtacttctgcaagacctccaccttcttcttcgactactggggccagggaaccaccctgacagtgtccagcaccacgacgccagcgccgcgaccaccaacaccggcgcccaccatcgcgtcgcagcccctgtccctgcgcccagaggcgtgccggccagcggcggggggcgcagtgcacacgagggggctggacttcgcctgtgatatctacatctgggcgcccttggccgggacttgtggggtccttctcctgtcactggttatcaccctttactgcaaacggggcagaaagaaactcctgtatatattcaaacaaccatttatgagaccagtacaaactactcaagaggaagatggctgtagctgccgatttccagaagaagaagaaggaggatgtgaactgagagtgaagttcagcaggagcgcagacgcccccgcgtacaagcagggccagaaccagctctataacgagctcaatctaggacgaagagaggagtacgatgttttggacaagaggcgtggccgggaccctgagatggggggaaagccgagaaggaagaaccctcaggaaggcctgtacaatgaactgcagaaagataagatggcggaggcctacagtgagattgggatgaaaggcgagcgccggaggggcaaggggcacgatggcctttaccagggtctcagtacagccaccaaggacacctacgacgcccttcacatgcaggccctgccccctcgctaatctagaggcgcgcccctctccctcccccccccctaacgttactggccgaagccgcttggaataaggccggtgtgcgtttgtctatatgttattttccaccatattgccgtcttttggcaatgtgagggcccggaaacctggccctgtcttcttgacgagcattcctaggggtctttcccctctcgccaaaggaatgcaaggtctgttgaatgtcgtgaaggaagcagttcctctggaagcttcttgaagacaaacaacgtctgtagcgaccctttgcaggcagcggaaccccccacctggcgacaggtgcctctgcggccaaaagccacgtgtataagatacacctgcaaaggcggcacaaccccagtgccacgttgtgagttggatagttgtggaaagagtcaaatggctctcctcaagcgtattcaacaaggggctgaaggatgcccagaaggtaccccattgtatgggatctgatctggggcctcggtacacatgctttacatgtgtttagtcgaggttaaaaaaacgtctaggccccccgaaccacggggacgtggttttcctttgaaaaacacgatgataatatggccacaacccatatgatggccttaccagtgaccgccttgctcctgccgctggccttgctgctccacgccgccaggccgatgggctggtcctgcatcatcctgttcctggtggccaccgccaccggcgtgcactccaacatcgtgctgacccagtcccccgcctccctggccgtgtccctgggccagcgggccaccatctcctgccgggcctccgagtccgtggactcctacggcaactccttcatgcactggtaccagcagaagcccggccagccccccaagctgctgatctacctggcctccaacctggagtccggcgtgcccgcccggttctccggctccggctcccggaccgacttcaccctgaccatcgaccccgtggaggccgacgacgtggccacctactactgccagcagaacaacggcgacccctacaccttcggcggcggcaccaagctggagatcatccggggcggcggcggctccggcggcggcggctccggcggcggcggctccatgggctggtcctgcatcatcctgttcctggtggccaccgccaccggcgtgcactccgaggtgcagctggtggagtccggcggcggcctgatgcagcccaagggctccctgaagctgtcctgcgccgcctccggcttcaccttcaagacctacgccctgaactgggtgcggcaggcccccggcaccggcctggagtgggtggcccggatccggtccaagtccaacaactacaccacctactacgccgactccgtgaaggaccggttcaccatctcccgggacgactcccagaacatgctgtacctgcagatgaacaacctgaagaccgaggacaccgccatgtactactgcgtgcggccccagtccggcacctccttcgcctactggggccagggcaccctggtgaccgtgtccgccgccaccacgacgccagcgccgcgaccaccaacaccggcgcccaccatcgcgtcgcagcccctgtccctgcgcccagaggcgtgccggccagcggcggggggcgcagtgcacacgagggggctggacttcgcctgtgatatctacatctgggcgcccttggccgggacttgtggggtccttctcctgtcactggttatcaccctttactgcaaacggggcagaaagaaactcctgtatatattcaaacaaccatttatgagaccagtacaaactactcaagaggaagatggctgtagctgccgatttccagaagaagaagaaggaggatgtgaactgagagtgaagttcagcaggagcgcagacgcccccgcgtacaagcagggccagaaccagctctataacgagctcaatctaggacgaagagaggagtacgatgttttggacaagaggcgtggccgggaccctgagatggggggaaagccgagaaggaagaaccctcaggaaggcctgtacaatgaactgcagaaagataagatggcggaggcctacagtgagattgggatgaaaggcgagcgccggaggggcaaggggcacgatggcctttaccagggtctcagtacagccaccaaggacacctacgacgcccttcacatgcaggccctgccccctcgctaa

SEQ ID NO: 241 - DNA, 3656 bp, Artificial Sequence
  Synthesized
atggccttaccagtgaccgccttgctcctgccgctggccttgctgctccacgccgccaggccggacatcgtgatgacccagtccccctccagcctgacagtgacagccggcgagaaggtgacaatgatctgtaagtccagccagagcctgctgaacagcggcgaccagaagaactacctgacctggtaccagcagaagcctggccagccccccaagctgctgatcttctgggccagcacaagggagagcggcgtgcccgacagattcacaggcagcggcagcggcaccgacttcacactgaccatttcctccgtgcaggccgaggacctcgccgtgtactactgccagaacgactactcctaccccctgacattcggcgccggcaccaaactggagctgaagggtggcggtggctcgggcggtggtgggtcgggtggcggcggatctcaggtgcagctccagcagtccgatgccgagctggtgaagcccggaagcagcgtcaagatcagctgtaaggcctccggctacaccttcacagaccacgccatccactgggtgaagcagaagcccgagcagggcctggagtggatcggccactttagccccggaaacaccgacatcaagtacaacgacaagttcaagggcaaggccaccctgaccgtggacaggagcagcagcaccgcctacatgcagctgaacagcctgacaagcgaggacagcgccgtgtacttctgcaagacctccaccttcttcttcgactactggggccagggaaccaccctgacagtgtccagcaccacgacgccagcgccgcgaccaccaacaccggcgcccaccatcgcgtcgcagcccctgtccctgcgcccagaggcgtgccggccagcggcggggggcgcagtgcacacgagggggctggacttcgcctgtgatatctacatctgggcgcccttggccgggacttgtggggtccttctcctgtcactggttatcaccaaacggggcagaaagaaactcctgtatatattcaaacaaccatttatgagaccagtacaaactactcaagaggaagatggctgtagctgccgatttccagaagaagaagaaggaggatgtgaactgagagtgaagttcagcaggagcgcagacgcccccgcgtacaagcagggccagaaccagctctataacgagctcaatctaggacgaagagaggagtacgatgttttggacaagaggcgtggccgggaccctgagatggggggaaagccgagaaggaagaaccctcaggaaggcctgtacaatgaactgcagaaagataagatggcggaggcctacagtgagattgggatgaaaggcgagcgccggaggggcaaggggcacgatggcctttaccagggtctcagtacagccaccaaggacacctacgacgcccttcacatgcaggccctgccccctcgctaatctagaggcgcgcccctctccctcccccccccctaacgttactggccgaagccgcttggaataaggccggtgtgcgtttgtctatatgttattttccaccatattgccgtcttttggcaatgtgagggcccggaaacctggccctgtcttcttgacgagcattcctaggggtctttcccctctcgccaaaggaatgcaaggtctgttgaatgtcgtgaaggaagcagttcctctggaagcttcttgaagacaaacaacgtctgtagcgaccctttgcaggcagcggaaccccccacctggcgacaggtgcctctgcggccaaaagccacgtgtataagatacacctgcaaaggcggcacaaccccagtgccacgttgtgagttggatagttgtggaaagagtcaaatggctctcctcaagcgtattcaacaaggggctgaaggatgcccagaaggtaccccattgtatgggatctgatctggggcctcggtacacatgctttacatgtgtttagtcgaggttaaaaaaacgtctaggccccccgaaccacggggacgtggttttcctttgaaaaacacgatgataatatggccacaacccatatgatggccttaccagtgaccgccttgctcctgccgctggccttgctgctccacgccgccaggccgatgggctggtcctgcatcatcctgttcctggtggccaccgccaccggcgtgcactccaacatcgtgctgacccagtcccccgcctccctggccgtgtccctgggccagcgggccaccatctcctgccgggcctccgagtccgtggactcctacggcaactccttcatgcactggtaccagcagaagcccggccagccccccaagctgctgatctacctggcctccaacctggagtccggcgtgcccgcccggttctccggctccggctcccggaccgacttcaccctgaccatcgaccccgtggaggccgacgacgtggccacctactactgccagcagaacaacggcgacccctacaccttcggcggcggcaccaagctggagatcatccggggcggcggcggctccggcggcggcggctccggcggcggcggctccatgggctggtcctgcatcatcctgttcctggtggccaccgccaccggcgtgcactccgaggtgcagctggtggagtccggcggcggcctgatgcagcccaagggctccctgaagctgtcctgcgccgcctccggcttcaccttcaagacctacgccctgaactgggtgcggcaggcccccggcaccggcctggagtgggtggcccggatccggtccaagtccaacaactacaccacctactacgccgactccgtgaaggaccggttcaccatctcccgggacgactcccagaacatgctgtacctgcagatgaacaacctgaagaccgaggacaccgccatgtactactgcgtgcggccccagtccggcacctccttcgcctactggggccagggcaccctggtgaccgtgtccgccgccaccacgacgccagcgccgcgaccaccaacaccggcgcccaccatcgcgtcgcagcccctgtccctgcgcccagaggcgtgccggccagcggcggggggcgcagtgcacacgagggggctggacttcgcctgtgatatctacatctgggcgcccttggccgggacttgtggggtccttctcctgtcactggttatcaccctttactgcaaacggggcagaaagaaactcctgtatatattcaaacaaccatttatgagaccagtacaaactactcaagaggaagatggctgtagctgccgatttccagaagaagaagaaggaggatgtgaactgagagtgaagttcagcaggagcgcagacgcccccgcgtacaagcagggccagaaccagctctataacgagctcaatctaggacgaagagaggagtacgatgttttggacaagaggcgtggccgggaccctgagatggggggaaagccgagaaggaagaaccctcaggaaggcctgtacaatgaactgcagaaagataagatggcggaggcctacagtgagattgggatgaaaggcgagcgccggaggggcaaggggcacgatggcctttaccagggtctcagtacagccaccaaggacacctacgacgcccttcacatgcaggccctgccccctcgctaa

SEQ ID NO: 242 - DNA, 3656 bp, Artificial Sequence
  Synthesized
atggccttaccagtgaccgccttgctcctgccgctggccttgctgctccacgccgccaggccggacatcgtgatgacccagtccccctccagcctgacagtgacagccggcgagaaggtgacaatgatctgtaagtccagccagagcctgctgaacagcggcgaccagaagaactacctgacctggtaccagcagaagcctggccagccccccaagctgctgatcttctgggccagcacaagggagagcggcgtgcccgacagattcacaggcagcggcagcggcaccgacttcacactgaccatttcctccgtgcaggccgaggacctcgccgtgtactactgccagaacgactactcctaccccctgacattcggcgccggcaccaaactggagctgaagggtggcggtggctcgggcggtggtgggtcgggtggcggcggatctcaggtgcagctccagcagtccgatgccgagctggtgaagcccggaagcagcgtcaagatcagctgtaaggcctccggctacaccttcacagaccacgccatccactgggtgaagcagaagcccgagcagggcctggagtggatcggccactttagccccggaaacaccgacatcaagtacaacgacaagttcaagggcaaggccaccctgaccgtggacaggagcagcagcaccgcctacatgcagctgaacagcctgacaagcgaggacagcgccgtgtacttctgcaagacctccaccttcttcttcgactactggggccagggaaccaccctgacagtgtccagcaccacgacgccagcgccgcgaccaccaacaccggcgcccaccatcgcgtcgcagcccctgtccctgcgcccagaggcgtgccggccagcggcggggggcgcagtgcacacgagggggctggacttcgcctgtgatatctacatctgggcgcccttggccgggacttgtggggtccttctcctgtcactggttatcaccctttactgcaaacggggcagaaagaaactcctgtatatattcaaacaaccatttatgagaccagtacaaactactcaagaggaagatggctgtagctgccgatttccagaagaagaagaaggaggatgtgaactgagagtgaagttcagcaggagcgcagacgcccccgcgtacaagcagggccagaaccagctctataacgagctcaatctaggacgaagagaggagtacgatgttttggacaagaggcgtggccgggaccctgagatggggggaaagccgagaaggaagaaccctcaggaaggcctgtacaatgaactgcagaaagataagatggcggaggcctacagtgagattgggatgaaaggcgagcgccggaggggcaaggggcacgatggcctttaccagggtctcagtacagccaccaaggacacctacgacgcccttcacatgcaggccctgccccctcgctaatctagaggcgcgcccctctccctcccccccccctaacgttactggccgaagccgcttggaataaggccggtgtgcgtttgtctatatgttattttccaccatattgccgtcttttggcaatgtgagggcccggaaacctggccctgtcttcttgacgagcattcctaggggtctttcccctctcgccaaaggaatgcaaggtctgttgaatgtcgtgaaggaagcagttcctctggaagcttcttgaagacaaacaacgtctgtagcgaccctttgcaggcagcggaaccccccacctggcgacaggtgcctctgcggccaaaagccacgtgtataagatacacctgcaaaggcggcacaaccccagtgccacgttgtgagttggatagttgtggaaagagtcaaatggctctcctcaagcgtattcaacaaggggctgaaggatgcccagaaggtaccccattgtatgggatctgatctggggcctcggtacacatgctttacatgtgtttagtcgaggttaaaaaaacgtctaggccccccgaaccacggggacgtggttttcctttgaaaaacacgatgataatatggccacaacccatatgatggccttaccagtgaccgccttgctcctgccgctggccttgctgctccacgccgccaggccgatgggctggtcctgcatcatcctgttcctggtggccaccgccaccggcgtgcactccaacatcgtgctgacccagtcccccgcctccctggccgtgtccctgggccagcgggccaccatctcctgccgggcctccgagtccgtggactcctacggcaactccttcatgcactggtaccagcagaagcccggccagccccccaagctgctgatctacctggcctccaacctggagtccggcgtgcccgcccggttctccggctccggctcccggaccgacttcaccctgaccatcgaccccgtggaggccgacgacgtggccacctactactgccagcagaacaacggcgacccctacaccttcggcggcggcaccaagctggagatcatccggggcggcggcggctccggcggcggcggctccggcggcggcggctccatgggctggtcctgcatcatcctgttcctggtggccaccgccaccggcgtgcactccgaggtgcagctggtggagtccggcggcggcctgatgcagcccaagggctccctgaagctgtcctgcgccgcctccggcttcaccttcaagacctacgccctgaactgggtgcggcaggcccccggcaccggcctggagtgggtggcccggatccggtccaagtccaacaactacaccacctactacgccgactccgtgaaggaccggttcaccatctcccgggacgactcccagaacatgctgtacctgcagatgaacaacctgaagaccgaggacaccgccatgtactactgcgtgcggccccagtccggcacctccttcgcctactggggccagggcaccctggtgaccgtgtccgccgccaccacgacgccagcgccgcgaccaccaacaccggcgcccaccatcgcgtcgcagcccctgtccctgcgcccagaggcgtgccggccagcggcggggggcgcagtgcacacgagggggctggacttcgcctgtgatatctacatctgggcgcccttggccgggacttgtggggtccttctcctgtcactggttatcaccaaacggggcagaaagaaactcctgtatatattcaaacaaccatttatgagaccagtacaaactactcaagaggaagatggctgtagctgccgatttccagaagaagaagaaggaggatgtgaactgagagtgaagttcagcaggagcgcagacgcccccgcgtacaagcagggccagaaccagctctataacgagctcaatctaggacgaagagaggagtacgatgttttggacaagaggcgtggccgggaccctgagatggggggaaagccgagaaggaagaaccctcaggaaggcctgtacaatgaactgcagaaagataagatggcggaggcctacagtgagattgggatgaaaggcgagcgccggaggggcaaggggcacgatggcctttaccagggtctcagtacagccaccaaggacacctacgacgcccttcacatgcaggccctgccccctcgctaa

SEQ ID NO: 243 - DNA, 3647 bp, Artificial Sequence
  Synthesized
atggccttaccagtgaccgccttgctcctgccgctggccttgctgctccacgccgccaggccggacatcgtgatgacccagtccccctccagcctgacagtgacagccggcgagaaggtgacaatgatctgtaagtccagccagagcctgctgaacagcggcgaccagaagaactacctgacctggtaccagcagaagcctggccagccccccaagctgctgatcttctgggccagcacaagggagagcggcgtgcccgacagattcacaggcagcggcagcggcaccgacttcacactgaccatttcctccgtgcaggccgaggacctcgccgtgtactactgccagaacgactactcctaccccctgacattcggcgccggcaccaaactggagctgaagggtggcggtggctcgggcggtggtgggtcgggtggcggcggatctcaggtgcagctccagcagtccgatgccgagctggtgaagcccggaagcagcgtcaagatcagctgtaaggcctccggctacaccttcacagaccacgccatccactgggtgaagcagaagcccgagcagggcctggagtggatcggccactttagccccggaaacaccgacatcaagtacaacgacaagttcaagggcaaggccaccctgaccgtggacaggagcagcagcaccgcctacatgcagctgaacagcctgacaagcgaggacagcgccgtgtacttctgcaagacctccaccttcttcttcgactactggggccagggaaccaccctgacagtgtccagcaccacgacgccagcgccgcgaccaccaacaccggcgcccaccatcgcgtcgcagcccctgtccctgcgcccagaggcgtgccggccagcggcggggggcgcagtgcacacgagggggctggacttcgcctgtgatatctacatctgggcgcccttggccgggacttgtggggtccttctcctgtcactggttatcaccaaacggggcagaaagaaactcctgtatatattcaaacaaccatttatgagaccagtacaaactactcaagaggaagatggctgtagctgccgatttccagaagaagaagaaggaggatgtgaactgagagtgaagttcagcaggagcgcagacgcccccgcgtacaagcagggccagaaccagctctataacgagctcaatctaggacgaagagaggagtacgatgttttggacaagaggcgtggccgggaccctgagatggggggaaagccgagaaggaagaaccctcaggaaggcctgtacaatgaactgcagaaagataagatggcggaggcctacagtgagattgggatgaaaggcgagcgccggaggggcaaggggcacgatggcctttaccagggtctcagtacagccaccaaggacacctacgacgcccttcacatgcaggccctgccccctcgctaatctagaggcgcgcccctctccctcccccccccctaacgttactggccgaagccgcttggaataaggccggtgtgcgtttgtctatatgttattttccaccatattgccgtcttttggcaatgtgagggcccggaaacctggccctgtcttcttgacgagcattcctaggggtctttcccctctcgccaaaggaatgcaaggtctgttgaatgtcgtgaaggaagcagttcctctggaagcttcttgaagacaaacaacgtctgtagcgaccctttgcaggcagcggaaccccccacctggcgacaggtgcctctgcggccaaaagccacgtgtataagatacacctgcaaaggcggcacaaccccagtgccacgttgtgagttggatagttgtggaaagagtcaaatggctctcctcaagcgtattcaacaaggggctgaaggatgcccagaaggtaccccattgtatgggatctgatctggggcctcggtacacatgctttacatgtgtttagtcgaggttaaaaaaacgtctaggccccccgaaccacggggacgtggttttcctttgaaaaacacgatgataatatggccacaacccatatgatggccttaccagtgaccgccttgctcctgccgctggccttgctgctccacgccgccaggccgatgggctggtcctgcatcatcctgttcctggtggccaccgccaccggcgtgcactccaacatcgtgctgacccagtcccccgcctccctggccgtgtccctgggccagcgggccaccatctcctgccgggcctccgagtccgtggactcctacggcaactccttcatgcactggtaccagcagaagcccggccagccccccaagctgctgatctacctggcctccaacctggagtccggcgtgcccgcccggttctccggctccggctcccggaccgacttcaccctgaccatcgaccccgtggaggccgacgacgtggccacctactactgccagcagaacaacggcgacccctacaccttcggcggcggcaccaagctggagatcatccggggcggcggcggctccggcggcggcggctccggcggcggcggctccatgggctggtcctgcatcatcctgttcctggtggccaccgccaccggcgtgcactccgaggtgcagctggtggagtccggcggcggcctgatgcagcccaagggctccctgaagctgtcctgcgccgcctccggcttcaccttcaagacctacgccctgaactgggtgcggcaggcccccggcaccggcctggagtgggtggcccggatccggtccaagtccaacaactacaccacctactacgccgactccgtgaaggaccggttcaccatctcccgggacgactcccagaacatgctgtacctgcagatgaacaacctgaagaccgaggacaccgccatgtactactgcgtgcggccccagtccggcacctccttcgcctactggggccagggcaccctggtgaccgtgtccgccgccaccacgacgccagcgccgcgaccaccaacaccggcgcccaccatcgcgtcgcagcccctgtccctgcgcccagaggcgtgccggccagcggcggggggcgcagtgcacacgagggggctggacttcgcctgtgatatctacatctgggcgcccttggccgggacttgtggggtccttctcctgtcactggttatcaccaaacggggcagaaagaaactcctgtatatattcaaacaaccatttatgagaccagtacaaactactcaagaggaagatggctgtagctgccgatttccagaagaagaagaaggaggatgtgaactgagagtgaagttcagcaggagcgcagacgcccccgcgtacaagcagggccagaaccagctctataacgagctcaatctaggacgaagagaggagtacgatgttttggacaagaggcgtggccgggaccctgagatggggggaaagccgagaaggaagaaccctcaggaaggcctgtacaatgaactgcagaaagataagatggcggaggcctacagtgagattgggatgaaaggcgagcgccggaggggcaaggggcacgatggcctttaccagggtctcagtacagccaccaaggacacctacgacgcccttcacatgcaggccctgccccctcgctaa

SEQ ID NO: 244 - DNA, 3518 bp, Artificial Sequence
  Synthesized
atggccttaccagtgaccgccttgctcctgccgctggccttgctgctccacgccgccaggccggatattgtgatgacccagtccccgtcctccctgaccgtgaccgcgggcgaaaaagtgaccatgatttgcaaatcctcccagtccctgctgaattccggcgatcagaaaaattatctgacctggtatcagcagaaaccgggccagccgccgaaactgctgattttttgggcgtccacccgtgaatccggcgtgccggatcgttttaccggctccggctccggcaccgattttaccctgaccatttcctccgtgcaggcggaagatctggcggtgtattattgccagaatgattattcctatccgctgacctttggcgcgggcaccaaactggaactgaaaggcggcggcggctccggcggcggcggctccggcggcggcggctcccaggtgcagctgcagcagtccgatgcggaactggtgaaaccgggctcctccgtgaaaatttcctgcaaagcgtccggctatacctttaccgatcatgcgattcattgggtgaaacagaaaccggaacagggcctggaatggattggccatttttccccgggcaataccgatattaaatataatgataaatttaaaggcaaagcgaccctgaccgtggatcgttcctcctccaccgcgtatatgcagctgaattccctgacctccgaagattccgcggtgtatttttgcaaaacctccacctttttttttgattattggggccagggcaccaccctgaccgtgtcctccaccacgacgccagcgccgcgaccaccaacaccggcgcccaccatcgcgtcgcagcccctgtccctgcgcccagaggcgtgccggccagcggcggggggcgcagtgcacacgagggggctggacttcgcctgtgatatctacatctgggcgcccttggccgggacttgtggggtccttctcctgtcactggttatcaccctttactgcaaacggggcagaaagaaactcctgtatatattcaaacaaccatttatgagaccagtacaaactactcaagaggaagatggctgtagctgccgatttccagaagaagaagaaggaggatgtgaactgagagtgaagttcagcaggagcgcagacgcccccgcgtacaagcagggccagaaccagctctataacgagctcaatctaggacgaagagaggagtacgatgttttggacaagaggcgtggccgggaccctgagatggggggaaagccgagaaggaagaaccctcaggaaggcctgtacaatgaactgcagaaagataagatggcggaggcctacagtgagattgggatgaaaggcgagcgccggaggggcaaggggcacgatggcctttaccagggtctcagtacagccaccaaggacacctacgacgcccttcacatgcaggccctgccccctcgctaatctagaggcgcgcccctctccctcccccccccctaacgttactggccgaagccgcttggaataaggccggtgtgcgtttgtctatatgttattttccaccatattgccgtcttttggcaatgtgagggcccggaaacctggccctgtcttcttgacgagcattcctaggggtctttcccctctcgccaaaggaatgcaaggtctgttgaatgtcgtgaaggaagcagttcctctggaagcttcttgaagacaaacaacgtctgtagcgaccctttgcaggcagcggaaccccccacctggcgacaggtgcctctgcggccaaaagccacgtgtataagatacacctgcaaaggcggcacaaccccagtgccacgttgtgagttggatagttgtggaaagagtcaaatggctctcctcaagcgtattcaacaaggggctgaaggatgcccagaaggtaccccattgtatgggatctgatctggggcctcggtacacatgctttacatgtgtttagtcgaggttaaaaaaacgtctaggccccccgaaccacggggacgtggttttcctttgaaaaacacgatgataatatggccacaacccatatgatggccttaccagtgaccgccttgctcctgccgctggccttgctgctccacgccgccaggccggacatccagctcacccagtccccgagctcgctgtccgcctccgtgggagatcgggtcaccatcacgtgccgcgccagccagtcgatttcctcctacctgaactggtaccaacagaagcccggaaaagccccgaagcttctcatctacgccgcctcgagcctgcagtcaggagtgccctcacggttctccggctccggttccggtactgatttcaccctgaccatttcctccctgcaaccggaggacttcgctacttactactgccagcagtcgtactccaccccctacactttcggacaaggcaccaaggtcgaaatcaagggtggcggtggctcgggcggtggtgggtcgggtggcggcggatctgaagtgcaattggtggaatcagggggaggacttgtgcagcctggaggatcgctgagactgtcatgtgccgtgtccggctttgccctgtccaaccacgggatgtcctgggtccgccgcgcgcctggaaagggcctcgaatgggtgtcgggtattgtgtacagcggtagcacctactatgccgcatccgtgaaggggagattcaccatcagccgggacaactccaggaacactctgtacctccaaatgaattcgctgaggccagaggacactgccatctactactgctccgcgcatggcggagagtccgacgtctggggacaggggaccaccgtgaccgtgtctagcaccacgacgccagcgccgcgaccaccaacaccggcgcccaccatcgcgtcgcagcccctgtccctgcgcccagaggcgtgccggccagcggcggggggcgcagtgcacacgagggggctggacttcgcctgtgatatctacatctgggcgcccttggccgggacttgtggggtccttctcctgtcactggttatcaccctttactgcaaacggggcagaaagaaactcctgtatatattcaaacaaccatttatgagaccagtacaaactactcaagaggaagatggctgtagctgccgatttccagaagaagaagaaggaggatgtgaactgagagtgaagttcagcaggagcgcagacgcccccgcgtacaagcagggccagaaccagctctataacgagctcaatctaggacgaagagaggagtacgatgttttggacaagaggcgtggccgggaccctgagatggggggaaagccgagaaggaagaaccctcaggaaggcctgtacaatgaactgcagaaagataagatggcggaggcctacagtgagattgggatgaaaggcgagcgccggaggggcaaggggcacgatggcctttaccagggtctcagtacagccaccaaggacacctacgacgcccttcacatgcaggccctgccccctcgctaa

SEQ ID NO: 245 - protein, 482 aa, Artificial Sequence
  Synthesized
MALPVTALLLPLALLLHAARPEIVLTQSPGTLSLSPGERATLSCRGGQSVSSSYLAWYQQKPGQAPRLLMYDASIRATGIPDRFSGSGSGTDFTLTISRLEPEDFAVYYCQQYQSWPLTFGQGTKVEIKGGGGSGGGGSGGGGSEVQLLESGGGLVQPGGSLRLSCAASGFTFSSYAMNWVRQAPGKGLEWVSAILSSGGSTYYADSVKGRFTISRDNSKNTLYLQMNSLRAEDTAVYYCARYWPMDIWGQGTLVTVSSTTTPAPRPPTPAPTIASQPLSLRPEACRPAAGGAVHTRGLDFACDIYIWAPLAGTCGVLLLSLVITLYCKRGRKKLLYIFKQPFMRPVQTTQEEDGCSCRFPEEEEGGCELRVKFSRSADAPAYQQGQNQLYNELNLGRREEYDVLDKRRGRDPEMGGKPRRKNPQEGLYNELQKDKMAEAYSEIGMKGERRRGKGHDGLYQGLSTATKDTYDALHMQALPPR

SEQ ID NO: 246 - DNA, 3509 bp, Artificial Sequence
  Synthesized
atggccttaccagtgaccgccttgctcctgccgctggccttgctgctccacgccgccaggccggatattgtgatgacccagtccccgtcctccctgaccgtgaccgcgggcgaaaaagtgaccatgatttgcaaatcctcccagtccctgctgaattccggcgatcagaaaaattatctgacctggtatcagcagaaaccgggccagccgccgaaactgctgattttttgggcgtccacccgtgaatccggcgtgccggatcgttttaccggctccggctccggcaccgattttaccctgaccatttcctccgtgcaggcggaagatctggcggtgtattattgccagaatgattattcctatccgctgacctttggcgcgggcaccaaactggaactgaaaggcggcggcggctccggcggcggcggctccggcggcggcggctcccaggtgcagctgcagcagtccgatgcggaactggtgaaaccgggctcctccgtgaaaatttcctgcaaagcgtccggctatacctttaccgatcatgcgattcattgggtgaaacagaaaccggaacagggcctggaatggattggccatttttccccgggcaataccgatattaaatataatgataaatttaaaggcaaagcgaccctgaccgtggatcgttcctcctccaccgcgtatatgcagctgaattccctgacctccgaagattccgcggtgtatttttgcaaaacctccacctttttttttgattattggggccagggcaccaccctgaccgtgtcctccaccacgacgccagcgccgcgaccaccaacaccggcgcccaccatcgcgtcgcagcccctgtccctgcgcccagaggcgtgccggccagcggcggggggcgcagtgcacacgagggggctggacttcgcctgtgatatctacatctgggcgcccttggccgggacttgtggggtccttctcctgtcactggttatcaccaaacggggcagaaagaaactcctgtatatattcaaacaaccatttatgagaccagtacaaactactcaagaggaagatggctgtagctgccgatttccagaagaagaagaaggaggatgtgaactgagagtgaagttcagcaggagcgcagacgcccccgcgtacaagcagggccagaaccagctctataacgagctcaatctaggacgaagagaggagtacgatgttttggacaagaggcgtggccgggaccctgagatggggggaaagccgagaaggaagaaccctcaggaaggcctgtacaatgaactgcagaaagataagatggcggaggcctacagtgagattgggatgaaaggcgagcgccggaggggcaaggggcacgatggcctttaccagggtctcagtacagccaccaaggacacctacgacgcccttcacatgcaggccctgccccctcgctaatctagaggcgcgcccctctccctcccccccccctaacgttactggccgaagccgcttggaataaggccggtgtgcgtttgtctatatgttattttccaccatattgccgtcttttggcaatgtgagggcccggaaacctggccctgtcttcttgacgagcattcctaggggtctttcccctctcgccaaaggaatgcaaggtctgttgaatgtcgtgaaggaagcagttcctctggaagcttcttgaagacaaacaacgtctgtagcgaccctttgcaggcagcggaaccccccacctggcgacaggtgcctctgcggccaaaagccacgtgtataagatacacctgcaaaggcggcacaaccccagtgccacgttgtgagttggatagttgtggaaagagtcaaatggctctcctcaagcgtattcaacaaggggctgaaggatgcccagaaggtaccccattgtatgggatctgatctggggcctcggtacacatgctttacatgtgtttagtcgaggttaaaaaaacgtctaggccccccgaaccacggggacgtggttttcctttgaaaaacacgatgataatatggccacaacccatatgatggccttaccagtgaccgccttgctcctgccgctggccttgctgctccacgccgccaggccggacatccagctcacccagtccccgagctcgctgtccgcctccgtgggagatcgggtcaccatcacgtgccgcgccagccagtcgatttcctcctacctgaactggtaccaacagaagcccggaaaagccccgaagcttctcatctacgccgcctcgagcctgcagtcaggagtgccctcacggttctccggctccggttccggtactgatttcaccctgaccatttcctccctgcaaccggaggacttcgctacttactactgccagcagtcgtactccaccccctacactttcggacaaggcaccaaggtcgaaatcaagggtggcggtggctcgggcggtggtgggtcgggtggcggcggatctgaagtgcaattggtggaatcagggggaggacttgtgcagcctggaggatcgctgagactgtcatgtgccgtgtccggctttgccctgtccaaccacgggatgtcctgggtccgccgcgcgcctggaaagggcctcgaatgggtgtcgggtattgtgtacagcggtagcacctactatgccgcatccgtgaaggggagattcaccatcagccgggacaactccaggaacactctgtacctccaaatgaattcgctgaggccagaggacactgccatctactactgctccgcgcatggcggagagtccgacgtctggggacaggggaccaccgtgaccgtgtctagcaccacgacgccagcgccgcgaccaccaacaccggcgcccaccatcgcgtcgcagcccctgtccctgcgcccagaggcgtgccggccagcggcggggggcgcagtgcacacgagggggctggacttcgcctgtgatatctacatctgggcgcccttggccgggacttgtggggtccttctcctgtcactggttatcaccctttactgcaaacggggcagaaagaaactcctgtatatattcaaacaaccatttatgagaccagtacaaactactcaagaggaagatggctgtagctgccgatttccagaagaagaagaaggaggatgtgaactgagagtgaagttcagcaggagcgcagacgcccccgcgtacaagcagggccagaaccagctctataacgagctcaatctaggacgaagagaggagtacgatgttttggacaagaggcgtggccgggaccctgagatggggggaaagccgagaaggaagaaccctcaggaaggcctgtacaatgaactgcagaaagataagatggcggaggcctacagtgagattgggatgaaaggcgagcgccggaggggcaaggggcacgatggcctttaccagggtctcagtacagccaccaaggacacctacgacgcccttcacatgcaggccctgccccctcgctaa

SEQ ID NO: 247 - DNA, 3509 bp, Artificial Sequence
  Synthesized
atggccttaccagtgaccgccttgctcctgccgctggccttgctgctccacgccgccaggccggatattgtgatgacccagtccccgtcctccctgaccgtgaccgcgggcgaaaaagtgaccatgatttgcaaatcctcccagtccctgctgaattccggcgatcagaaaaattatctgacctggtatcagcagaaaccgggccagccgccgaaactgctgattttttgggcgtccacccgtgaatccggcgtgccggatcgttttaccggctccggctccggcaccgattttaccctgaccatttcctccgtgcaggcggaagatctggcggtgtattattgccagaatgattattcctatccgctgacctttggcgcgggcaccaaactggaactgaaaggcggcggcggctccggcggcggcggctccggcggcggcggctcccaggtgcagctgcagcagtccgatgcggaactggtgaaaccgggctcctccgtgaaaatttcctgcaaagcgtccggctatacctttaccgatcatgcgattcattgggtgaaacagaaaccggaacagggcctggaatggattggccatttttccccgggcaataccgatattaaatataatgataaatttaaaggcaaagcgaccctgaccgtggatcgttcctcctccaccgcgtatatgcagctgaattccctgacctccgaagattccgcggtgtatttttgcaaaacctccacctttttttttgattattggggccagggcaccaccctgaccgtgtcctccaccacgacgccagcgccgcgaccaccaacaccggcgcccaccatcgcgtcgcagcccctgtccctgcgcccagaggcgtgccggccagcggcggggggcgcagtgcacacgagggggctggacttcgcctgtgatatctacatctgggcgcccttggccgggacttgtggggtccttctcctgtcactggttatcaccctttactgcaaacggggcagaaagaaactcctgtatatattcaaacaaccatttatgagaccagtacaaactactcaagaggaagatggctgtagctgccgatttccagaagaagaagaaggaggatgtgaactgagagtgaagttcagcaggagcgcagacgcccccgcgtacaagcagggccagaaccagctctataacgagctcaatctaggacgaagagaggagtacgatgttttggacaagaggcgtggccgggaccctgagatggggggaaagccgagaaggaagaaccctcaggaaggcctgtacaatgaactgcagaaagataagatggcggaggcctacagtgagattgggatgaaaggcgagcgccggaggggcaaggggcacgatggcctttaccagggtctcagtacagccaccaaggacacctacgacgcccttcacatgcaggccctgccccctcgctaatctagaggcgcgcccctctccctcccccccccctaacgttactggccgaagccgcttggaataaggccggtgtgcgtttgtctatatgttattttccaccatattgccgtcttttggcaatgtgagggcccggaaacctggccctgtcttcttgacgagcattcctaggggtctttcccctctcgccaaaggaatgcaaggtctgttgaatgtcgtgaaggaagcagttcctctggaagcttcttgaagacaaacaacgtctgtagcgaccctttgcaggcagcggaaccccccacctggcgacaggtgcctctgcggccaaaagccacgtgtataagatacacctgcaaaggcggcacaaccccagtgccacgttgtgagttggatagttgtggaaagagtcaaatggctctcctcaagcgtattcaacaaggggctgaaggatgcccagaaggtaccccattgtatgggatctgatctggggcctcggtacacatgctttacatgtgtttagtcgaggttaaaaaaacgtctaggccccccgaaccacggggacgtggttttcctttgaaaaacacgatgataatatggccacaacccatatgatggccttaccagtgaccgccttgctcctgccgctggccttgctgctccacgccgccaggccggacatccagctcacccagtccccgagctcgctgtccgcctccgtgggagatcgggtcaccatcacgtgccgcgccagccagtcgatttcctcctacctgaactggtaccaacagaagcccggaaaagccccgaagcttctcatctacgccgcctcgagcctgcagtcaggagtgccctcacggttctccggctccggttccggtactgatttcaccctgaccatttcctccctgcaaccggaggacttcgctacttactactgccagcagtcgtactccaccccctacactttcggacaaggcaccaaggtcgaaatcaagggtggcggtggctcgggcggtggtgggtcgggtggcggcggatctgaagtgcaattggtggaatcagggggaggacttgtgcagcctggaggatcgctgagactgtcatgtgccgtgtccggctttgccctgtccaaccacgggatgtcctgggtccgccgcgcgcctggaaagggcctcgaatgggtgtcgggtattgtgtacagcggtagcacctactatgccgcatccgtgaaggggagattcaccatcagccgggacaactccaggaacactctgtacctccaaatgaattcgctgaggccagaggacactgccatctactactgctccgcgcatggcggagagtccgacgtctggggacaggggaccaccgtgaccgtgtctagcaccacgacgccagcgccgcgaccaccaacaccggcgcccaccatcgcgtcgcagcccctgtccctgcgcccagaggcgtgccggccagcggcggggggcgcagtgcacacgagggggctggacttcgcctgtgatatctacatctgggcgcccttggccgggacttgtggggtccttctcctgtcactggttatcaccaaacggggcagaaagaaactcctgtatatattcaaacaaccatttatgagaccagtacaaactactcaagaggaagatggctgtagctgccgatttccagaagaagaagaaggaggatgtgaactgagagtgaagttcagcaggagcgcagacgcccccgcgtacaagcagggccagaaccagctctataacgagctcaatctaggacgaagagaggagtacgatgttttggacaagaggcgtggccgggaccctgagatggggggaaagccgagaaggaagaaccctcaggaaggcctgtacaatgaactgcagaaagataagatggcggaggcctacagtgagattgggatgaaaggcgagcgccggaggggcaaggggcacgatggcctttaccagggtctcagtacagccaccaaggacacctacgacgcccttcacatgcaggccctgccccctcgctaa

SEQ ID NO: 248 - protein, 479 aa, Artificial Sequence
  Synthesized
MALPVTALLLPLALLLHAARPEIVLTQSPGTLSLSPGERATLSCRGGQSVSSSYLAWYQQKPGQAPRLLMYDASIRATGIPDRFSGSGSGTDFTLTISRLEPEDFAVYYCQQYQSWPLTFGQGTKVEIKGGGGSGGGGSGGGGSEVQLLESGGGLVQPGGSLRLSCAASGFTFSSYAMNWVRQAPGKGLEWVSAILSSGGSTYYADSVKGRFTISRDNSKNTLYLQMNSLRAEDTAVYYCARYWPMDIWGQGTLVTVSSTTTPAPRPPTPAPTIASQPLSLRPEACRPAAGGAVHTRGLDFACDIYIWAPLAGTCGVLLLSLVITKRGRKKLLYIFKQPFMRPVQTTQEEDGCSCRFPEEEEGGCELRVKFSRSADAPAYQQGQNQLYNELNLGRREEYDVLDKRRGRDPEMGGKPRRKNPQEGLYNELQKDKMAEAYSEIGMKGERRRGKGHDGLYQGLSTATKDTYDALHMQALPPR

SEQ ID NO: 249 - DNA, 3500 bp, Artificial Sequence
  Synthesized
atggccttaccagtgaccgccttgctcctgccgctggccttgctgctccacgccgccaggccggatattgtgatgacccagtccccgtcctccctgaccgtgaccgcgggcgaaaaagtgaccatgatttgcaaatcctcccagtccctgctgaattccggcgatcagaaaaattatctgacctggtatcagcagaaaccgggccagccgccgaaactgctgattttttgggcgtccacccgtgaatccggcgtgccggatcgttttaccggctccggctccggcaccgattttaccctgaccatttcctccgtgcaggcggaagatctggcggtgtattattgccagaatgattattcctatccgctgacctttggcgcgggcaccaaactggaactgaaaggcggcggcggctccggcggcggcggctccggcggcggcggctcccaggtgcagctgcagcagtccgatgcggaactggtgaaaccgggctcctccgtgaaaatttcctgcaaagcgtccggctatacctttaccgatcatgcgattcattgggtgaaacagaaaccggaacagggcctggaatggattggccatttttccccgggcaataccgatattaaatataatgataaatttaaaggcaaagcgaccctgaccgtggatcgttcctcctccaccgcgtatatgcagctgaattccctgacctccgaagattccgcggtgtatttttgcaaaacctccacctttttttttgattattggggccagggcaccaccctgaccgtgtcctccaccacgacgccagcgccgcgaccaccaacaccggcgcccaccatcgcgtcgcagcccctgtccctgcgcccagaggcgtgccggccagcggcggggggcgcagtgcacacgagggggctggacttcgcctgtgatatctacatctgggcgcccttggccgggacttgtggggtccttctcctgtcactggttatcaccaaacggggcagaaagaaactcctgtatatattcaaacaaccatttatgagaccagtacaaactactcaagaggaagatggctgtagctgccgatttccagaagaagaagaaggaggatgtgaactgagagtgaagttcagcaggagcgcagacgcccccgcgtacaagcagggccagaaccagctctataacgagctcaatctaggacgaagagaggagtacgatgttttggacaagaggcgtggccgggaccctgagatggggggaaagccgagaaggaagaaccctcaggaaggcctgtacaatgaactgcagaaagataagatggcggaggcctacagtgagattgggatgaaaggcgagcgccggaggggcaaggggcacgatggcctttaccagggtctcagtacagccaccaaggacacctacgacgcccttcacatgcaggccctgccccctcgctaatctagaggcgcgcccctctccctcccccccccctaacgttactggccgaagccgcttggaataaggccggtgtgcgtttgtctatatgttattttccaccatattgccgtcttttggcaatgtgagggcccggaaacctggccctgtcttcttgacgagcattcctaggggtctttcccctctcgccaaaggaatgcaaggtctgttgaatgtcgtgaaggaagcagttcctctggaagcttcttgaagacaaacaacgtctgtagcgaccctttgcaggcagcggaaccccccacctggcgacaggtgcctctgcggccaaaagccacgtgtataagatacacctgcaaaggcggcacaaccccagtgccacgttgtgagttggatagttgtggaaagagtcaaatggctctcctcaagcgtattcaacaaggggctgaaggatgcccagaaggtaccccattgtatgggatctgatctggggcctcggtacacatgctttacatgtgtttagtcgaggttaaaaaaacgtctaggccccccgaaccacggggacgtggttttcctttgaaaaacacgatgataatatggccacaacccatatgatggccttaccagtgaccgccttgctcctgccgctggccttgctgctccacgccgccaggccggacatccagctcacccagtccccgagctcgctgtccgcctccgtgggagatcgggtcaccatcacgtgccgcgccagccagtcgatttcctcctacctgaactggtaccaacagaagcccggaaaagccccgaagcttctcatctacgccgcctcgagcctgcagtcaggagtgccctcacggttctccggctccggttccggtactgatttcaccctgaccatttcctccctgcaaccggaggacttcgctacttactactgccagcagtcgtactccaccccctacactttcggacaaggcaccaaggtcgaaatcaagggtggcggtggctcgggcggtggtgggtcgggtggcggcggatctgaagtgcaattggtggaatcagggggaggacttgtgcagcctggaggatcgctgagactgtcatgtgccgtgtccggctttgccctgtccaaccacgggatgtcctgggtccgccgcgcgcctggaaagggcctcgaatgggtgtcgggtattgtgtacagcggtagcacctactatgccgcatccgtgaaggggagattcaccatcagccgggacaactccaggaacactctgtacctccaaatgaattcgctgaggccagaggacactgccatctactactgctccgcgcatggcggagagtccgacgtctggggacaggggaccaccgtgaccgtgtctagcaccacgacgccagcgccgcgaccaccaacaccggcgcccaccatcgcgtcgcagcccctgtccctgcgcccagaggcgtgccggccagcggcggggggcgcagtgcacacgagggggctggacttcgcctgtgatatctacatctgggcgcccttggccgggacttgtggggtccttctcctgtcactggttatcaccaaacggggcagaaagaaactcctgtatatattcaaacaaccatttatgagaccagtacaaactactcaagaggaagatggctgtagctgccgatttccagaagaagaagaaggaggatgtgaactgagagtgaagttcagcaggagcgcagacgcccccgcgtacaagcagggccagaaccagctctataacgagctcaatctaggacgaagagaggagtacgatgttttggacaagaggcgtggccgggaccctgagatggggggaaagccgagaaggaagaaccctcaggaaggcctgtacaatgaactgcagaaagataagatggcggaggcctacagtgagattgggatgaaaggcgagcgccggaggggcaaggggcacgatggcctttaccagggtctcagtacagccaccaaggacacctacgacgcccttcacatgcaggccctgccccctcgctaa

SEQ ID NO: 250 - DNA, 3518 bp, Artificial Sequence
  Synthesized
atggccttaccagtgaccgccttgctcctgccgctggccttgctgctccacgccgccaggccggacatcgtgatgacccagtccccctccagcctgacagtgacagccggcgagaaggtgacaatgatctgtaagtccagccagagcctgctgaacagcggcgaccagaagaactacctgacctggtaccagcagaagcctggccagccccccaagctgctgatcttctgggccagcacaagggagagcggcgtgcccgacagattcacaggcagcggcagcggcaccgacttcacactgaccatttcctccgtgcaggccgaggacctcgccgtgtactactgccagaacgactactcctaccccctgacattcggcgccggcaccaaactggagctgaagggtggcggtggctcgggcggtggtgggtcgggtggcggcggatctcaggtgcagctccagcagtccgatgccgagctggtgaagcccggaagcagcgtcaagatcagctgtaaggcctccggctacaccttcacagaccacgccatccactgggtgaagcagaagcccgagcagggcctggagtggatcggccactttagccccggaaacaccgacatcaagtacaacgacaagttcaagggcaaggccaccctgaccgtggacaggagcagcagcaccgcctacatgcagctgaacagcctgacaagcgaggacagcgccgtgtacttctgcaagacctccaccttcttcttcgactactggggccagggaaccaccctgacagtgtccagcaccacgacgccagcgccgcgaccaccaacaccggcgcccaccatcgcgtcgcagcccctgtccctgcgcccagaggcgtgccggccagcggcggggggcgcagtgcacacgagggggctggacttcgcctgtgatatctacatctgggcgcccttggccgggacttgtggggtccttctcctgtcactggttatcaccctttactgcaaacggggcagaaagaaactcctgtatatattcaaacaaccatttatgagaccagtacaaactactcaagaggaagatggctgtagctgccgatttccagaagaagaagaaggaggatgtgaactgagagtgaagttcagcaggagcgcagacgcccccgcgtacaagcagggccagaaccagctctataacgagctcaatctaggacgaagagaggagtacgatgttttggacaagaggcgtggccgggaccctgagatggggggaaagccgagaaggaagaaccctcaggaaggcctgtacaatgaactgcagaaagataagatggcggaggcctacagtgagattgggatgaaaggcgagcgccggaggggcaaggggcacgatggcctttaccagggtctcagtacagccaccaaggacacctacgacgcccttcacatgcaggccctgccccctcgctaatctagaggcgcgcccctctccctcccccccccctaacgttactggccgaagccgcttggaataaggccggtgtgcgtttgtctatatgttattttccaccatattgccgtcttttggcaatgtgagggcccggaaacctggccctgtcttcttgacgagcattcctaggggtctttcccctctcgccaaaggaatgcaaggtctgttgaatgtcgtgaaggaagcagttcctctggaagcttcttgaagacaaacaacgtctgtagcgaccctttgcaggcagcggaaccccccacctggcgacaggtgcctctgcggccaaaagccacgtgtataagatacacctgcaaaggcggcacaaccccagtgccacgttgtgagttggatagttgtggaaagagtcaaatggctctcctcaagcgtattcaacaaggggctgaaggatgcccagaaggtaccccattgtatgggatctgatctggggcctcggtacacatgctttacatgtgtttagtcgaggttaaaaaaacgtctaggccccccgaaccacggggacgtggttttcctttgaaaaacacgatgataatatggccacaacccatatgatggccttaccagtgaccgccttgctcctgccgctggccttgctgctccacgccgccaggccggacatccagctcacccagtccccgagctcgctgtccgcctccgtgggagatcgggtcaccatcacgtgccgcgccagccagtcgatttcctcctacctgaactggtaccaacagaagcccggaaaagccccgaagcttctcatctacgccgcctcgagcctgcagtcaggagtgccctcacggttctccggctccggttccggtactgatttcaccctgaccatttcctccctgcaaccggaggacttcgctacttactactgccagcagtcgtactccaccccctacactttcggacaaggcaccaaggtcgaaatcaagggtggcggtggctcgggcggtggtgggtcgggtggcggcggatctgaagtgcaattggtggaatcagggggaggacttgtgcagcctggaggatcgctgagactgtcatgtgccgtgtccggctttgccctgtccaaccacgggatgtcctgggtccgccgcgcgcctggaaagggcctcgaatgggtgtcgggtattgtgtacagcggtagcacctactatgccgcatccgtgaaggggagattcaccatcagccgggacaactccaggaacactctgtacctccaaatgaattcgctgaggccagaggacactgccatctactactgctccgcgcatggcggagagtccgacgtctggggacaggggaccaccgtgaccgtgtctagcaccacgacgccagcgccgcgaccaccaacaccggcgcccaccatcgcgtcgcagcccctgtccctgcgcccagaggcgtgccggccagcggcggggggcgcagtgcacacgagggggctggacttcgcctgtgatatctacatctgggcgcccttggccgggacttgtggggtccttctcctgtcactggttatcaccctttactgcaaacggggcagaaagaaactcctgtatatattcaaacaaccatttatgagaccagtacaaactactcaagaggaagatggctgtagctgccgatttccagaagaagaagaaggaggatgtgaactgagagtgaagttcagcaggagcgcagacgcccccgcgtacaagcagggccagaaccagctctataacgagctcaatctaggacgaagagaggagtacgatgttttggacaagaggcgtggccgggaccctgagatggggggaaagccgagaaggaagaaccctcaggaaggcctgtacaatgaactgcagaaagataagatggcggaggcctacagtgagattgggatgaaaggcgagcgccggaggggcaaggggcacgatggcctttaccagggtctcagtacagccaccaaggacacctacgacgcccttcacatgcaggccctgccccctcgctaa

SEQ ID NO: 251 - DNA, 3509 bp, Artificial Sequence
  Synthesized
atggccttaccagtgaccgccttgctcctgccgctggccttgctgctccacgccgccaggccggacatcgtgatgacccagtccccctccagcctgacagtgacagccggcgagaaggtgacaatgatctgtaagtccagccagagcctgctgaacagcggcgaccagaagaactacctgacctggtaccagcagaagcctggccagccccccaagctgctgatcttctgggccagcacaagggagagcggcgtgcccgacagattcacaggcagcggcagcggcaccgacttcacactgaccatttcctccgtgcaggccgaggacctcgccgtgtactactgccagaacgactactcctaccccctgacattcggcgccggcaccaaactggagctgaagggtggcggtggctcgggcggtggtgggtcgggtggcggcggatctcaggtgcagctccagcagtccgatgccgagctggtgaagcccggaagcagcgtcaagatcagctgtaaggcctccggctacaccttcacagaccacgccatccactgggtgaagcagaagcccgagcagggcctggagtggatcggccactttagccccggaaacaccgacatcaagtacaacgacaagttcaagggcaaggccaccctgaccgtggacaggagcagcagcaccgcctacatgcagctgaacagcctgacaagcgaggacagcgccgtgtacttctgcaagacctccaccttcttcttcgactactggggccagggaaccaccctgacagtgtccagcaccacgacgccagcgccgcgaccaccaacaccggcgcccaccatcgcgtcgcagcccctgtccctgcgcccagaggcgtgccggccagcggcggggggcgcagtgcacacgagggggctggacttcgcctgtgatatctacatctgggcgcccttggccgggacttgtggggtccttctcctgtcactggttatcaccaaacggggcagaaagaaactcctgtatatattcaaacaaccatttatgagaccagtacaaactactcaagaggaagatggctgtagctgccgatttccagaagaagaagaaggaggatgtgaactgagagtgaagttcagcaggagcgcagacgcccccgcgtacaagcagggccagaaccagctctataacgagctcaatctaggacgaagagaggagtacgatgttttggacaagaggcgtggccgggaccctgagatggggggaaagccgagaaggaagaaccctcaggaaggcctgtacaatgaactgcagaaagataagatggcggaggcctacagtgagattgggatgaaaggcgagcgccggaggggcaaggggcacgatggcctttaccagggtctcagtacagccaccaaggacacctacgacgcccttcacatgcaggccctgccccctcgctaatctagaggcgcgcccctctccctcccccccccctaacgttactggccgaagccgcttggaataaggccggtgtgcgtttgtctatatgttattttccaccatattgccgtcttttggcaatgtgagggcccggaaacctggccctgtcttcttgacgagcattcctaggggtctttcccctctcgccaaaggaatgcaaggtctgttgaatgtcgtgaaggaagcagttcctctggaagcttcttgaagacaaacaacgtctgtagcgaccctttgcaggcagcggaaccccccacctggcgacaggtgcctctgcggccaaaagccacgtgtataagatacacctgcaaaggcggcacaaccccagtgccacgttgtgagttggatagttgtggaaagagtcaaatggctctcctcaagcgtattcaacaaggggctgaaggatgcccagaaggtaccccattgtatgggatctgatctggggcctcggtacacatgctttacatgtgtttagtcgaggttaaaaaaacgtctaggccccccgaaccacggggacgtggttttcctttgaaaaacacgatgataatatggccacaacccatatgatggccttaccagtgaccgccttgctcctgccgctggccttgctgctccacgccgccaggccggacatccagctcacccagtccccgagctcgctgtccgcctccgtgggagatcgggtcaccatcacgtgccgcgccagccagtcgatttcctcctacctgaactggtaccaacagaagcccggaaaagccccgaagcttctcatctacgccgcctcgagcctgcagtcaggagtgccctcacggttctccggctccggttccggtactgatttcaccctgaccatttcctccctgcaaccggaggacttcgctacttactactgccagcagtcgtactccaccccctacactttcggacaaggcaccaaggtcgaaatcaagggtggcggtggctcgggcggtggtgggtcgggtggcggcggatctgaagtgcaattggtggaatcagggggaggacttgtgcagcctggaggatcgctgagactgtcatgtgccgtgtccggctttgccctgtccaaccacgggatgtcctgggtccgccgcgcgcctggaaagggcctcgaatgggtgtcgggtattgtgtacagcggtagcacctactatgccgcatccgtgaaggggagattcaccatcagccgggacaactccaggaacactctgtacctccaaatgaattcgctgaggccagaggacactgccatctactactgctccgcgcatggcggagagtccgacgtctggggacaggggaccaccgtgaccgtgtctagcaccacgacgccagcgccgcgaccaccaacaccggcgcccaccatcgcgtcgcagcccctgtccctgcgcccagaggcgtgccggccagcggcggggggcgcagtgcacacgagggggctggacttcgcctgtgatatctacatctgggcgcccttggccgggacttgtggggtccttctcctgtcactggttatcaccctttactgcaaacggggcagaaagaaactcctgtatatattcaaacaaccatttatgagaccagtacaaactactcaagaggaagatggctgtagctgccgatttccagaagaagaagaaggaggatgtgaactgagagtgaagttcagcaggagcgcagacgcccccgcgtacaagcagggccagaaccagctctataacgagctcaatctaggacgaagagaggagtacgatgttttggacaagaggcgtggccgggaccctgagatggggggaaagccgagaaggaagaaccctcaggaaggcctgtacaatgaactgcagaaagataagatggcggaggcctacagtgagattgggatgaaaggcgagcgccggaggggcaaggggcacgatggcctttaccagggtctcagtacagccaccaaggacacctacgacgcccttcacatgcaggccctgccccctcgctaa

SEQ ID NO: 252 - DNA, 3509 bp, Artificial Sequence
  Synthesized
atggccttaccagtgaccgccttgctcctgccgctggccttgctgctccacgccgccaggccggacatcgtgatgacccagtccccctccagcctgacagtgacagccggcgagaaggtgacaatgatctgtaagtccagccagagcctgctgaacagcggcgaccagaagaactacctgacctggtaccagcagaagcctggccagccccccaagctgctgatcttctgggccagcacaagggagagcggcgtgcccgacagattcacaggcagcggcagcggcaccgacttcacactgaccatttcctccgtgcaggccgaggacctcgccgtgtactactgccagaacgactactcctaccccctgacattcggcgccggcaccaaactggagctgaagggtggcggtggctcgggcggtggtgggtcgggtggcggcggatctcaggtgcagctccagcagtccgatgccgagctggtgaagcccggaagcagcgtcaagatcagctgtaaggcctccggctacaccttcacagaccacgccatccactgggtgaagcagaagcccgagcagggcctggagtggatcggccactttagccccggaaacaccgacatcaagtacaacgacaagttcaagggcaaggccaccctgaccgtggacaggagcagcagcaccgcctacatgcagctgaacagcctgacaagcgaggacagcgccgtgtacttctgcaagacctccaccttcttcttcgactactggggccagggaaccaccctgacagtgtccagcaccacgacgccagcgccgcgaccaccaacaccggcgcccaccatcgcgtcgcagcccctgtccctgcgcccagaggcgtgccggccagcggcggggggcgcagtgcacacgagggggctggacttcgcctgtgatatctacatctgggcgcccttggccgggacttgtggggtccttctcctgtcactggttatcaccctttactgcaaacggggcagaaagaaactcctgtatatattcaaacaaccatttatgagaccagtacaaactactcaagaggaagatggctgtagctgccgatttccagaagaagaagaaggaggatgtgaactgagagtgaagttcagcaggagcgcagacgcccccgcgtacaagcagggccagaaccagctctataacgagctcaatctaggacgaagagaggagtacgatgttttggacaagaggcgtggccgggaccctgagatggggggaaagccgagaaggaagaaccctcaggaaggcctgtacaatgaactgcagaaagataagatggcggaggcctacagtgagattgggatgaaaggcgagcgccggaggggcaaggggcacgatggcctttaccagggtctcagtacagccaccaaggacacctacgacgcccttcacatgcaggccctgccccctcgctaatctagaggcgcgcccctctccctcccccccccctaacgttactggccgaagccgcttggaataaggccggtgtgcgtttgtctatatgttattttccaccatattgccgtcttttggcaatgtgagggcccggaaacctggccctgtcttcttgacgagcattcctaggggtctttcccctctcgccaaaggaatgcaaggtctgttgaatgtcgtgaaggaagcagttcctctggaagcttcttgaagacaaacaacgtctgtagcgaccctttgcaggcagcggaaccccccacctggcgacaggtgcctctgcggccaaaagccacgtgtataagatacacctgcaaaggcggcacaaccccagtgccacgttgtgagttggatagttgtggaaagagtcaaatggctctcctcaagcgtattcaacaaggggctgaaggatgcccagaaggtaccccattgtatgggatctgatctggggcctcggtacacatgctttacatgtgtttagtcgaggttaaaaaaacgtctaggccccccgaaccacggggacgtggttttcctttgaaaaacacgatgataatatggccacaacccatatgatggccttaccagtgaccgccttgctcctgccgctggccttgctgctccacgccgccaggccggacatccagctcacccagtccccgagctcgctgtccgcctccgtgggagatcgggtcaccatcacgtgccgcgccagccagtcgatttcctcctacctgaactggtaccaacagaagcccggaaaagccccgaagcttctcatctacgccgcctcgagcctgcagtcaggagtgccctcacggttctccggctccggttccggtactgatttcaccctgaccatttcctccctgcaaccggaggacttcgctacttactactgccagcagtcgtactccaccccctacactttcggacaaggcaccaaggtcgaaatcaagggtggcggtggctcgggcggtggtgggtcgggtggcggcggatctgaagtgcaattggtggaatcagggggaggacttgtgcagcctggaggatcgctgagactgtcatgtgccgtgtccggctttgccctgtccaaccacgggatgtcctgggtccgccgcgcgcctggaaagggcctcgaatgggtgtcgggtattgtgtacagcggtagcacctactatgccgcatccgtgaaggggagattcaccatcagccgggacaactccaggaacactctgtacctccaaatgaattcgctgaggccagaggacactgccatctactactgctccgcgcatggcggagagtccgacgtctggggacaggggaccaccgtgaccgtgtctagcaccacgacgccagcgccgcgaccaccaacaccggcgcccaccatcgcgtcgcagcccctgtccctgcgcccagaggcgtgccggccagcggcggggggcgcagtgcacacgagggggctggacttcgcctgtgatatctacatctgggcgcccttggccgggacttgtggggtccttctcctgtcactggttatcaccaaacggggcagaaagaaactcctgtatatattcaaacaaccatttatgagaccagtacaaactactcaagaggaagatggctgtagctgccgatttccagaagaagaagaaggaggatgtgaactgagagtgaagttcagcaggagcgcagacgcccccgcgtacaagcagggccagaaccagctctataacgagctcaatctaggacgaagagaggagtacgatgttttggacaagaggcgtggccgggaccctgagatggggggaaagccgagaaggaagaaccctcaggaaggcctgtacaatgaactgcagaaagataagatggcggaggcctacagtgagattgggatgaaaggcgagcgccggaggggcaaggggcacgatggcctttaccagggtctcagtacagccaccaaggacacctacgacgcccttcacatgcaggccctgccccctcgctaa

SEQ ID NO: 253 - DNA, 3500 bp, Artificial Sequence
  Synthesized
atggccttaccagtgaccgccttgctcctgccgctggccttgctgctccacgccgccaggccggacatcgtgatgacccagtccccctccagcctgacagtgacagccggcgagaaggtgacaatgatctgtaagtccagccagagcctgctgaacagcggcgaccagaagaactacctgacctggtaccagcagaagcctggccagccccccaagctgctgatcttctgggccagcacaagggagagcggcgtgcccgacagattcacaggcagcggcagcggcaccgacttcacactgaccatttcctccgtgcaggccgaggacctcgccgtgtactactgccagaacgactactcctaccccctgacattcggcgccggcaccaaactggagctgaagggtggcggtggctcgggcggtggtgggtcgggtggcggcggatctcaggtgcagctccagcagtccgatgccgagctggtgaagcccggaagcagcgtcaagatcagctgtaaggcctccggctacaccttcacagaccacgccatccactgggtgaagcagaagcccgagcagggcctggagtggatcggccactttagccccggaaacaccgacatcaagtacaacgacaagttcaagggcaaggccaccctgaccgtggacaggagcagcagcaccgcctacatgcagctgaacagcctgacaagcgaggacagcgccgtgtacttctgcaagacctccaccttcttcttcgactactggggccagggaaccaccctgacagtgtccagcaccacgacgccagcgccgcgaccaccaacaccggcgcccaccatcgcgtcgcagcccctgtccctgcgcccagaggcgtgccggccagcggcggggggcgcagtgcacacgagggggctggacttcgcctgtgatatctacatctgggcgcccttggccgggacttgtggggtccttctcctgtcactggttatcaccaaacggggcagaaagaaactcctgtatatattcaaacaaccatttatgagaccagtacaaactactcaagaggaagatggctgtagctgccgatttccagaagaagaagaaggaggatgtgaactgagagtgaagttcagcaggagcgcagacgcccccgcgtacaagcagggccagaaccagctctataacgagctcaatctaggacgaagagaggagtacgatgttttggacaagaggcgtggccgggaccctgagatggggggaaagccgagaaggaagaaccctcaggaaggcctgtacaatgaactgcagaaagataagatggcggaggcctacagtgagattgggatgaaaggcgagcgccggaggggcaaggggcacgatggcctttaccagggtctcagtacagccaccaaggacacctacgacgcccttcacatgcaggccctgccccctcgctaatctagaggcgcgcccctctccctcccccccccctaacgttactggccgaagccgcttggaataaggccggtgtgcgtttgtctatatgttattttccaccatattgccgtcttttggcaatgtgagggcccggaaacctggccctgtcttcttgacgagcattcctaggggtctttcccctctcgccaaaggaatgcaaggtctgttgaatgtcgtgaaggaagcagttcctctggaagcttcttgaagacaaacaacgtctgtagcgaccctttgcaggcagcggaaccccccacctggcgacaggtgcctctgcggccaaaagccacgtgtataagatacacctgcaaaggcggcacaaccccagtgccacgttgtgagttggatagttgtggaaagagtcaaatggctctcctcaagcgtattcaacaaggggctgaaggatgcccagaaggtaccccattgtatgggatctgatctggggcctcggtacacatgctttacatgtgtttagtcgaggttaaaaaaacgtctaggccccccgaaccacggggacgtggttttcctttgaaaaacacgatgataatatggccacaacccatatgatggccttaccagtgaccgccttgctcctgccgctggccttgctgctccacgccgccaggccggacatccagctcacccagtccccgagctcgctgtccgcctccgtgggagatcgggtcaccatcacgtgccgcgccagccagtcgatttcctcctacctgaactggtaccaacagaagcccggaaaagccccgaagcttctcatctacgccgcctcgagcctgcagtcaggagtgccctcacggttctccggctccggttccggtactgatttcaccctgaccatttcctccctgcaaccggaggacttcgctacttactactgccagcagtcgtactccaccccctacactttcggacaaggcaccaaggtcgaaatcaagggtggcggtggctcgggcggtggtgggtcgggtggcggcggatctgaagtgcaattggtggaatcagggggaggacttgtgcagcctggaggatcgctgagactgtcatgtgccgtgtccggctttgccctgtccaaccacgggatgtcctgggtccgccgcgcgcctggaaagggcctcgaatgggtgtcgggtattgtgtacagcggtagcacctactatgccgcatccgtgaaggggagattcaccatcagccgggacaactccaggaacactctgtacctccaaatgaattcgctgaggccagaggacactgccatctactactgctccgcgcatggcggagagtccgacgtctggggacaggggaccaccgtgaccgtgtctagcaccacgacgccagcgccgcgaccaccaacaccggcgcccaccatcgcgtcgcagcccctgtccctgcgcccagaggcgtgccggccagcggcggggggcgcagtgcacacgagggggctggacttcgcctgtgatatctacatctgggcgcccttggccgggacttgtggggtccttctcctgtcactggttatcaccaaacggggcagaaagaaactcctgtatatattcaaacaaccatttatgagaccagtacaaactactcaagaggaagatggctgtagctgccgatttccagaagaagaagaaggaggatgtgaactgagagtgaagttcagcaggagcgcagacgcccccgcgtacaagcagggccagaaccagctctataacgagctcaatctaggacgaagagaggagtacgatgttttggacaagaggcgtggccgggaccctgagatggggggaaagccgagaaggaagaaccctcaggaaggcctgtacaatgaactgcagaaagataagatggcggaggcctacagtgagattgggatgaaaggcgagcgccggaggggcaaggggcacgatggcctttaccagggtctcagtacagccaccaaggacacctacgacgcccttcacatgcaggccctgccccctcgctaa

SEQ ID NO: 254 - DNA, 3545 bp, Artificial Sequence
  Synthesized
atggccttaccagtgaccgccttgctcctgccgctggccttgctgctccacgccgccaggccggatattgtgatgacccagtccccgtcctccctgaccgtgaccgcgggcgaaaaagtgaccatgatttgcaaatcctcccagtccctgctgaattccggcgatcagaaaaattatctgacctggtatcagcagaaaccgggccagccgccgaaactgctgattttttgggcgtccacccgtgaatccggcgtgccggatcgttttaccggctccggctccggcaccgattttaccctgaccatttcctccgtgcaggcggaagatctggcggtgtattattgccagaatgattattcctatccgctgacctttggcgcgggcaccaaactggaactgaaaggcggcggcggctccggcggcggcggctccggcggcggcggctcccaggtgcagctgcagcagtccgatgcggaactggtgaaaccgggctcctccgtgaaaatttcctgcaaagcgtccggctatacctttaccgatcatgcgattcattgggtgaaacagaaaccggaacagggcctggaatggattggccatttttccccgggcaataccgatattaaatataatgataaatttaaaggcaaagcgaccctgaccgtggatcgttcctcctccaccgcgtatatgcagctgaattccctgacctccgaagattccgcggtgtatttttgcaaaacctccacctttttttttgattattggggccagggcaccaccctgaccgtgtcctccaccacgacgccagcgccgcgaccaccaacaccggcgcccaccatcgcgtcgcagcccctgtccctgcgcccagaggcgtgccggccagcggcggggggcgcagtgcacacgagggggctggacttcgcctgtgatatctacatctgggcgcccttggccgggacttgtggggtccttctcctgtcactggttatcaccctttactgcaaacggggcagaaagaaactcctgtatatattcaaacaaccatttatgagaccagtacaaactactcaagaggaagatggctgtagctgccgatttccagaagaagaagaaggaggatgtgaactgagagtgaagttcagcaggagcgcagacgcccccgcgtacaagcagggccagaaccagctctataacgagctcaatctaggacgaagagaggagtacgatgttttggacaagaggcgtggccgggaccctgagatggggggaaagccgagaaggaagaaccctcaggaaggcctgtacaatgaactgcagaaagataagatggcggaggcctacagtgagattgggatgaaaggcgagcgccggaggggcaaggggcacgatggcctttaccagggtctcagtacagccaccaaggacacctacgacgcccttcacatgcaggccctgccccctcgctaatctagaggcgcgcccctctccctcccccccccctaacgttactggccgaagccgcttggaataaggccggtgtgcgtttgtctatatgttattttccaccatattgccgtcttttggcaatgtgagggcccggaaacctggccctgtcttcttgacgagcattcctaggggtctttcccctctcgccaaaggaatgcaaggtctgttgaatgtcgtgaaggaagcagttcctctggaagcttcttgaagacaaacaacgtctgtagcgaccctttgcaggcagcggaaccccccacctggcgacaggtgcctctgcggccaaaagccacgtgtataagatacacctgcaaaggcggcacaaccccagtgccacgttgtgagttggatagttgtggaaagagtcaaatggctctcctcaagcgtattcaacaaggggctgaaggatgcccagaaggtaccccattgtatgggatctgatctggggcctcggtacacatgctttacatgtgtttagtcgaggttaaaaaaacgtctaggccccccgaaccacggggacgtggttttcctttgaaaaacacgatgataatatggccacaacccatatgatggccttaccagtgaccgccttgctcctgccgctggccttgctgctccacgccgccaggccggagatcgtgatgacccagtcccccctgtccctgcccgtgacccccggcgagcccgcctccatctcctgccggtcctcccagtccctgctgcactccaacggctacaactacctggactggtacctgcagaagcccggccagtccccccagctgctgatctacctgggctccaaccgggcctccggcgtgcccgaccggttctccggctccggctccggcaccgacttcaccctgaagatctcccgggtggaggccgaggacgtgggcgtgtactactgcatgcaggccctgcagacccccaccttcggccccggcaccaaggtggacatcaagggcggcggcggctccggcggcggcggctccggcggcggcggctcccaggtgcagctggtgcagtccggcggcggcgtggtgcagcccggcaagtccctgcggctgtcctgcgccgcctccggcttcaccttctccatcttcgccatgcactgggtgcggcaggcccccggcaagggcctggagtgggtggccaccatctcctacgacggctccaacgccttctacgccgactccgtggagggccggttcaccatctcccgggacaactccaaggactccctgtacctgcagatggactccctgcggcccgaggacaccgccgtgtactactgcgtgaaggccggcgacggcggctacgacgtgttcgactcctggggccagggcaccctggtgaccgtgtcctccaccacgacgccagcgccgcgaccaccaacaccggcgcccaccatcgcgtcgcagcccctgtccctgcgcccagaggcgtgccggccagcggcggggggcgcagtgcacacgagggggctggacttcgcctgtgatatctacatctgggcgcccttggccgggacttgtggggtccttctcctgtcactggttatcaccctttactgcaaacggggcagaaagaaactcctgtatatattcaaacaaccatttatgagaccagtacaaactactcaagaggaagatggctgtagctgccgatttccagaagaagaagaaggaggatgtgaactgagagtgaagttcagcaggagcgcagacgcccccgcgtacaagcagggccagaaccagctctataacgagctcaatctaggacgaagagaggagtacgatgttttggacaagaggcgtggccgggaccctgagatggggggaaagccgagaaggaagaaccctcaggaaggcctgtacaatgaactgcagaaagataagatggcggaggcctacagtgagattgggatgaaaggcgagcgccggaggggcaaggggcacgatggcctttaccagggtctcagtacagccaccaaggacacctacgacgcccttcacatgcaggccctgccccctcgctaa

SEQ ID NO: 255 - protein, 490 aa, Artificial Sequence
  Synthesized
MALPVTALLLPLALLLHAARPEIVMTQSPLSLPVTPGEPASISCRSSQSLLHSNGYNYLDWYLQKPGQSPQLLIYLGSNRASGVPDRFSGSGSGTDFTLKISRVEAEDVGVYYCMQALQTPTFGPGTKVDIKGGGGSGGGGSGGGGSQVQLVQSGGGVVQPGKSLRLSCAASGFTFSIFAMHWVRQAPGKGLEWVATISYDGSNAFYADSVEGRFTISRDNSKDSLYLQMDSLRPEDTAVYYCVKAGDGGYDVFDSWGQGTLVTVSSTTTPAPRPPTPAPTIASQPLSLRPEACRPAAGGAVHTRGLDFACDIYIWAPLAGTCGVLLLSLVITLYCKRGRKKLLYIFKQPFMRPVQTTQEEDGCSCRFPEEEEGGCELRVKFSRSADAPAYQQGQNQLYNELNLGRREEYDVLDKRRGRDPEMGGKPRRKNPQEGLYNELQKDKMAEAYSEIGMKGERRRGKGHDGLYQGLSTATKDTYDALHMQALPPR

SEQ ID NO: 256 - DNA, 3536 bp, Artificial Sequence
  Synthesized
atggccttaccagtgaccgccttgctcctgccgctggccttgctgctccacgccgccaggccggatattgtgatgacccagtccccgtcctccctgaccgtgaccgcgggcgaaaaagtgaccatgatttgcaaatcctcccagtccctgctgaattccggcgatcagaaaaattatctgacctggtatcagcagaaaccgggccagccgccgaaactgctgattttttgggcgtccacccgtgaatccggcgtgccggatcgttttaccggctccggctccggcaccgattttaccctgaccatttcctccgtgcaggcggaagatctggcggtgtattattgccagaatgattattcctatccgctgacctttggcgcgggcaccaaactggaactgaaaggcggcggcggctccggcggcggcggctccggcggcggcggctcccaggtgcagctgcagcagtccgatgcggaactggtgaaaccgggctcctccgtgaaaatttcctgcaaagcgtccggctatacctttaccgatcatgcgattcattgggtgaaacagaaaccggaacagggcctggaatggattggccatttttccccgggcaataccgatattaaatataatgataaatttaaaggcaaagcgaccctgaccgtggatcgttcctcctccaccgcgtatatgcagctgaattccctgacctccgaagattccgcggtgtatttttgcaaaacctccacctttttttttgattattggggccagggcaccaccctgaccgtgtcctccaccacgacgccagcgccgcgaccaccaacaccggcgcccaccatcgcgtcgcagcccctgtccctgcgcccagaggcgtgccggccagcggcggggggcgcagtgcacacgagggggctggacttcgcctgtgatatctacatctgggcgcccttggccgggacttgtggggtccttctcctgtcactggttatcaccaaacggggcagaaagaaactcctgtatatattcaaacaaccatttatgagaccagtacaaactactcaagaggaagatggctgtagctgccgatttccagaagaagaagaaggaggatgtgaactgagagtgaagttcagcaggagcgcagacgcccccgcgtacaagcagggccagaaccagctctataacgagctcaatctaggacgaagagaggagtacgatgttttggacaagaggcgtggccgggaccctgagatggggggaaagccgagaaggaagaaccctcaggaaggcctgtacaatgaactgcagaaagataagatggcggaggcctacagtgagattgggatgaaaggcgagcgccggaggggcaaggggcacgatggcctttaccagggtctcagtacagccaccaaggacacctacgacgcccttcacatgcaggccctgccccctcgctaatctagaggcgcgcccctctccctcccccccccctaacgttactggccgaagccgcttggaataaggccggtgtgcgtttgtctatatgttattttccaccatattgccgtcttttggcaatgtgagggcccggaaacctggccctgtcttcttgacgagcattcctaggggtctttcccctctcgccaaaggaatgcaaggtctgttgaatgtcgtgaaggaagcagttcctctggaagcttcttgaagacaaacaacgtctgtagcgaccctttgcaggcagcggaaccccccacctggcgacaggtgcctctgcggccaaaagccacgtgtataagatacacctgcaaaggcggcacaaccccagtgccacgttgtgagttggatagttgtggaaagagtcaaatggctctcctcaagcgtattcaacaaggggctgaaggatgcccagaaggtaccccattgtatgggatctgatctggggcctcggtacacatgctttacatgtgtttagtcgaggttaaaaaaacgtctaggccccccgaaccacggggacgtggttttcctttgaaaaacacgatgataatatggccacaacccatatgatggccttaccagtgaccgccttgctcctgccgctggccttgctgctccacgccgccaggccggagatcgtgatgacccagtcccccctgtccctgcccgtgacccccggcgagcccgcctccatctcctgccggtcctcccagtccctgctgcactccaacggctacaactacctggactggtacctgcagaagcccggccagtccccccagctgctgatctacctgggctccaaccgggcctccggcgtgcccgaccggttctccggctccggctccggcaccgacttcaccctgaagatctcccgggtggaggccgaggacgtgggcgtgtactactgcatgcaggccctgcagacccccaccttcggccccggcaccaaggtggacatcaagggcggcggcggctccggcggcggcggctccggcggcggcggctcccaggtgcagctggtgcagtccggcggcggcgtggtgcagcccggcaagtccctgcggctgtcctgcgccgcctccggcttcaccttctccatcttcgccatgcactgggtgcggcaggcccccggcaagggcctggagtgggtggccaccatctcctacgacggctccaacgccttctacgccgactccgtggagggccggttcaccatctcccgggacaactccaaggactccctgtacctgcagatggactccctgcggcccgaggacaccgccgtgtactactgcgtgaaggccggcgacggcggctacgacgtgttcgactcctggggccagggcaccctggtgaccgtgtcctccaccacgacgccagcgccgcgaccaccaacaccggcgcccaccatcgcgtcgcagcccctgtccctgcgcccagaggcgtgccggccagcggcggggggcgcagtgcacacgagggggctggacttcgcctgtgatatctacatctgggcgcccttggccgggacttgtggggtccttctcctgtcactggttatcaccctttactgcaaacggggcagaaagaaactcctgtatatattcaaacaaccatttatgagaccagtacaaactactcaagaggaagatggctgtagctgccgatttccagaagaagaagaaggaggatgtgaactgagagtgaagttcagcaggagcgcagacgcccccgcgtacaagcagggccagaaccagctctataacgagctcaatctaggacgaagagaggagtacgatgttttggacaagaggcgtggccgggaccctgagatggggggaaagccgagaaggaagaaccctcaggaaggcctgtacaatgaactgcagaaagataagatggcggaggcctacagtgagattgggatgaaaggcgagcgccggaggggcaaggggcacgatggcctttaccagggtctcagtacagccaccaaggacacctacgacgcccttcacatgcaggccctgccccctcgctaa

SEQ ID NO: 257 - DNA, 3536 bp, Artificial Sequence
  Synthesized
atggccttaccagtgaccgccttgctcctgccgctggccttgctgctccacgccgccaggccggatattgtgatgacccagtccccgtcctccctgaccgtgaccgcgggcgaaaaagtgaccatgatttgcaaatcctcccagtccctgctgaattccggcgatcagaaaaattatctgacctggtatcagcagaaaccgggccagccgccgaaactgctgattttttgggcgtccacccgtgaatccggcgtgccggatcgttttaccggctccggctccggcaccgattttaccctgaccatttcctccgtgcaggcggaagatctggcggtgtattattgccagaatgattattcctatccgctgacctttggcgcgggcaccaaactggaactgaaaggcggcggcggctccggcggcggcggctccggcggcggcggctcccaggtgcagctgcagcagtccgatgcggaactggtgaaaccgggctcctccgtgaaaatttcctgcaaagcgtccggctatacctttaccgatcatgcgattcattgggtgaaacagaaaccggaacagggcctggaatggattggccatttttccccgggcaataccgatattaaatataatgataaatttaaaggcaaagcgaccctgaccgtggatcgttcctcctccaccgcgtatatgcagctgaattccctgacctccgaagattccgcggtgtatttttgcaaaacctccacctttttttttgattattggggccagggcaccaccctgaccgtgtcctccaccacgacgccagcgccgcgaccaccaacaccggcgcccaccatcgcgtcgcagcccctgtccctgcgcccagaggcgtgccggccagcggcggggggcgcagtgcacacgagggggctggacttcgcctgtgatatctacatctgggcgcccttggccgggacttgtggggtccttctcctgtcactggttatcaccctttactgcaaacggggcagaaagaaactcctgtatatattcaaacaaccatttatgagaccagtacaaactactcaagaggaagatggctgtagctgccgatttccagaagaagaagaaggaggatgtgaactgagagtgaagttcagcaggagcgcagacgcccccgcgtacaagcagggccagaaccagctctataacgagctcaatctaggacgaagagaggagtacgatgttttggacaagaggcgtggccgggaccctgagatggggggaaagccgagaaggaagaaccctcaggaaggcctgtacaatgaactgcagaaagataagatggcggaggcctacagtgagattgggatgaaaggcgagcgccggaggggcaaggggcacgatggcctttaccagggtctcagtacagccaccaaggacacctacgacgcccttcacatgcaggccctgccccctcgctaatctagaggcgcgcccctctccctcccccccccctaacgttactggccgaagccgcttggaataaggccggtgtgcgtttgtctatatgttattttccaccatattgccgtcttttggcaatgtgagggcccggaaacctggccctgtcttcttgacgagcattcctaggggtctttcccctctcgccaaaggaatgcaaggtctgttgaatgtcgtgaaggaagcagttcctctggaagcttcttgaagacaaacaacgtctgtagcgaccctttgcaggcagcggaaccccccacctggcgacaggtgcctctgcggccaaaagccacgtgtataagatacacctgcaaaggcggcacaaccccagtgccacgttgtgagttggatagttgtggaaagagtcaaatggctctcctcaagcgtattcaacaaggggctgaaggatgcccagaaggtaccccattgtatgggatctgatctggggcctcggtacacatgctttacatgtgtttagtcgaggttaaaaaaacgtctaggccccccgaaccacggggacgtggttttcctttgaaaaacacgatgataatatggccacaacccatatgatggccttaccagtgaccgccttgctcctgccgctggccttgctgctccacgccgccaggccggagatcgtgatgacccagtcccccctgtccctgcccgtgacccccggcgagcccgcctccatctcctgccggtcctcccagtccctgctgcactccaacggctacaactacctggactggtacctgcagaagcccggccagtccccccagctgctgatctacctgggctccaaccgggcctccggcgtgcccgaccggttctccggctccggctccggcaccgacttcaccctgaagatctcccgggtggaggccgaggacgtgggcgtgtactactgcatgcaggccctgcagacccccaccttcggccccggcaccaaggtggacatcaagggcggcggcggctccggcggcggcggctccggcggcggcggctcccaggtgcagctggtgcagtccggcggcggcgtggtgcagcccggcaagtccctgcggctgtcctgcgccgcctccggcttcaccttctccatcttcgccatgcactgggtgcggcaggcccccggcaagggcctggagtgggtggccaccatctcctacgacggctccaacgccttctacgccgactccgtggagggccggttcaccatctcccgggacaactccaaggactccctgtacctgcagatggactccctgcggcccgaggacaccgccgtgtactactgcgtgaaggccggcgacggcggctacgacgtgttcgactcctggggccagggcaccctggtgaccgtgtcctccaccacgacgccagcgccgcgaccaccaacaccggcgcccaccatcgcgtcgcagcccctgtccctgcgcccagaggcgtgccggccagcggcggggggcgcagtgcacacgagggggctggacttcgcctgtgatatctacatctgggcgcccttggccgggacttgtggggtccttctcctgtcactggttatcaccaaacggggcagaaagaaactcctgtatatattcaaacaaccatttatgagaccagtacaaactactcaagaggaagatggctgtagctgccgatttccagaagaagaagaaggaggatgtgaactgagagtgaagttcagcaggagcgcagacgcccccgcgtacaagcagggccagaaccagctctataacgagctcaatctaggacgaagagaggagtacgatgttttggacaagaggcgtggccgggaccctgagatggggggaaagccgagaaggaagaaccctcaggaaggcctgtacaatgaactgcagaaagataagatggcggaggcctacagtgagattgggatgaaaggcgagcgccggaggggcaaggggcacgatggcctttaccagggtctcagtacagccaccaaggacacctacgacgcccttcacatgcaggccctgccccctcgctaa

SEQ ID NO: 258 - protein, 487 aa, Artificial Sequence
  Synthesized
MALPVTALLLPLALLLHAARPEIVMTQSPLSLPVTPGEPASISCRSSQSLLHSNGYNYLDWYLQKPGQSPQLLIYLGSNRASGVPDRFSGSGSGTDFTLKISRVEAEDVGVYYCMQALQTPTFGPGTKVDIKGGGGSGGGGSGGGGSQVQLVQSGGGVVQPGKSLRLSCAASGFTFSIFAMHWVRQAPGKGLEWVATISYDGSNAFYADSVEGRFTISRDNSKDSLYLQMDSLRPEDTAVYYCVKAGDGGYDVFDSWGQGTLVTVSSTTTPAPRPPTPAPTIASQPLSLRPEACRPAAGGAVHTRGLDFACDIYIWAPLAGTCGVLLLSLVITKRGRKKLLYIFKQPFMRPVQTTQEEDGCSCRFPEEEEGGCELRVKFSRSADAPAYQQGQNQLYNELNLGRREEYDVLDKRRGRDPEMGGKPRRKNPQEGLYNELQKDKMAEAYSEIGMKGERRRGKGHDGLYQGLSTATKDTYDALHMQALPPR

SEQ ID NO: 259 - DNA, 3527 bp, Artificial Sequence
  Synthesized
atggccttaccagtgaccgccttgctcctgccgctggccttgctgctccacgccgccaggccggatattgtgatgacccagtccccgtcctccctgaccgtgaccgcgggcgaaaaagtgaccatgatttgcaaatcctcccagtccctgctgaattccggcgatcagaaaaattatctgacctggtatcagcagaaaccgggccagccgccgaaactgctgattttttgggcgtccacccgtgaatccggcgtgccggatcgttttaccggctccggctccggcaccgattttaccctgaccatttcctccgtgcaggcggaagatctggcggtgtattattgccagaatgattattcctatccgctgacctttggcgcgggcaccaaactggaactgaaaggcggcggcggctccggcggcggcggctccggcggcggcggctcccaggtgcagctgcagcagtccgatgcggaactggtgaaaccgggctcctccgtgaaaatttcctgcaaagcgtccggctatacctttaccgatcatgcgattcattgggtgaaacagaaaccggaacagggcctggaatggattggccatttttccccgggcaataccgatattaaatataatgataaatttaaaggcaaagcgaccctgaccgtggatcgttcctcctccaccgcgtatatgcagctgaattccctgacctccgaagattccgcggtgtatttttgcaaaacctccacctttttttttgattattggggccagggcaccaccctgaccgtgtcctccaccacgacgccagcgccgcgaccaccaacaccggcgcccaccatcgcgtcgcagcccctgtccctgcgcccagaggcgtgccggccagcggcggggggcgcagtgcacacgagggggctggacttcgcctgtgatatctacatctgggcgcccttggccgggacttgtggggtccttctcctgtcactggttatcaccaaacggggcagaaagaaactcctgtatatattcaaacaaccatttatgagaccagtacaaactactcaagaggaagatggctgtagctgccgatttccagaagaagaagaaggaggatgtgaactgagagtgaagttcagcaggagcgcagacgcccccgcgtacaagcagggccagaaccagctctataacgagctcaatctaggacgaagagaggagtacgatgttttggacaagaggcgtggccgggaccctgagatggggggaaagccgagaaggaagaaccctcaggaaggcctgtacaatgaactgcagaaagataagatggcggaggcctacagtgagattgggatgaaaggcgagcgccggaggggcaaggggcacgatggcctttaccagggtctcagtacagccaccaaggacacctacgacgcccttcacatgcaggccctgccccctcgctaatctagaggcgcgcccctctccctcccccccccctaacgttactggccgaagccgcttggaataaggccggtgtgcgtttgtctatatgttattttccaccatattgccgtcttttggcaatgtgagggcccggaaacctggccctgtcttcttgacgagcattcctaggggtctttcccctctcgccaaaggaatgcaaggtctgttgaatgtcgtgaaggaagcagttcctctggaagcttcttgaagacaaacaacgtctgtagcgaccctttgcaggcagcggaaccccccacctggcgacaggtgcctctgcggccaaaagccacgtgtataagatacacctgcaaaggcggcacaaccccagtgccacgttgtgagttggatagttgtggaaagagtcaaatggctctcctcaagcgtattcaacaaggggctgaaggatgcccagaaggtaccccattgtatgggatctgatctggggcctcggtacacatgctttacatgtgtttagtcgaggttaaaaaaacgtctaggccccccgaaccacggggacgtggttttcctttgaaaaacacgatgataatatggccacaacccatatgatggccttaccagtgaccgccttgctcctgccgctggccttgctgctccacgccgccaggccggagatcgtgatgacccagtcccccctgtccctgcccgtgacccccggcgagcccgcctccatctcctgccggtcctcccagtccctgctgcactccaacggctacaactacctggactggtacctgcagaagcccggccagtccccccagctgctgatctacctgggctccaaccgggcctccggcgtgcccgaccggttctccggctccggctccggcaccgacttcaccctgaagatctcccgggtggaggccgaggacgtgggcgtgtactactgcatgcaggccctgcagacccccaccttcggccccggcaccaaggtggacatcaagggcggcggcggctccggcggcggcggctccggcggcggcggctcccaggtgcagctggtgcagtccggcggcggcgtggtgcagcccggcaagtccctgcggctgtcctgcgccgcctccggcttcaccttctccatcttcgccatgcactgggtgcggcaggcccccggcaagggcctggagtgggtggccaccatctcctacgacggctccaacgccttctacgccgactccgtggagggccggttcaccatctcccgggacaactccaaggactccctgtacctgcagatggactccctgcggcccgaggacaccgccgtgtactactgcgtgaaggccggcgacggcggctacgacgtgttcgactcctggggccagggcaccctggtgaccgtgtcctccaccacgacgccagcgccgcgaccaccaacaccggcgcccaccatcgcgtcgcagcccctgtccctgcgcccagaggcgtgccggccagcggcggggggcgcagtgcacacgagggggctggacttcgcctgtgatatctacatctgggcgcccttggccgggacttgtggggtccttctcctgtcactggttatcaccaaacggggcagaaagaaactcctgtatatattcaaacaaccatttatgagaccagtacaaactactcaagaggaagatggctgtagctgccgatttccagaagaagaagaaggaggatgtgaactgagagtgaagttcagcaggagcgcagacgcccccgcgtacaagcagggccagaaccagctctataacgagctcaatctaggacgaagagaggagtacgatgttttggacaagaggcgtggccgggaccctgagatggggggaaagccgagaaggaagaaccctcaggaaggcctgtacaatgaactgcagaaagataagatggcggaggcctacagtgagattgggatgaaaggcgagcgccggaggggcaaggggcacgatggcctttaccagggtctcagtacagccaccaaggacacctacgacgcccttcacatgcaggccctgccccctcgctaa

SEQ ID NO: 260 - DNA, 3545 bp, Artificial Sequence
  Synthesized
atggccttaccagtgaccgccttgctcctgccgctggccttgctgctccacgccgccaggccggacatcgtgatgacccagtccccctccagcctgacagtgacagccggcgagaaggtgacaatgatctgtaagtccagccagagcctgctgaacagcggcgaccagaagaactacctgacctggtaccagcagaagcctggccagccccccaagctgctgatcttctgggccagcacaagggagagcggcgtgcccgacagattcacaggcagcggcagcggcaccgacttcacactgaccatttcctccgtgcaggccgaggacctcgccgtgtactactgccagaacgactactcctaccccctgacattcggcgccggcaccaaactggagctgaagggtggcggtggctcgggcggtggtgggtcgggtggcggcggatctcaggtgcagctccagcagtccgatgccgagctggtgaagcccggaagcagcgtcaagatcagctgtaaggcctccggctacaccttcacagaccacgccatccactgggtgaagcagaagcccgagcagggcctggagtggatcggccactttagccccggaaacaccgacatcaagtacaacgacaagttcaagggcaaggccaccctgaccgtggacaggagcagcagcaccgcctacatgcagctgaacagcctgacaagcgaggacagcgccgtgtacttctgcaagacctccaccttcttcttcgactactggggccagggaaccaccctgacagtgtccagcaccacgacgccagcgccgcgaccaccaacaccggcgcccaccatcgcgtcgcagcccctgtccctgcgcccagaggcgtgccggccagcggcggggggcgcagtgcacacgagggggctggacttcgcctgtgatatctacatctgggcgcccttggccgggacttgtggggtccttctcctgtcactggttatcaccctttactgcaaacggggcagaaagaaactcctgtatatattcaaacaaccatttatgagaccagtacaaactactcaagaggaagatggctgtagctgccgatttccagaagaagaagaaggaggatgtgaactgagagtgaagttcagcaggagcgcagacgcccccgcgtacaagcagggccagaaccagctctataacgagctcaatctaggacgaagagaggagtacgatgttttggacaagaggcgtggccgggaccctgagatggggggaaagccgagaaggaagaaccctcaggaaggcctgtacaatgaactgcagaaagataagatggcggaggcctacagtgagattgggatgaaaggcgagcgccggaggggcaaggggcacgatggcctttaccagggtctcagtacagccaccaaggacacctacgacgcccttcacatgcaggccctgccccctcgctaatctagaggcgcgcccctctccctcccccccccctaacgttactggccgaagccgcttggaataaggccggtgtgcgtttgtctatatgttattttccaccatattgccgtcttttggcaatgtgagggcccggaaacctggccctgtcttcttgacgagcattcctaggggtctttcccctctcgccaaaggaatgcaaggtctgttgaatgtcgtgaaggaagcagttcctctggaagcttcttgaagacaaacaacgtctgtagcgaccctttgcaggcagcggaaccccccacctggcgacaggtgcctctgcggccaaaagccacgtgtataagatacacctgcaaaggcggcacaaccccagtgccacgttgtgagttggatagttgtggaaagagtcaaatggctctcctcaagcgtattcaacaaggggctgaaggatgcccagaaggtaccccattgtatgggatctgatctggggcctcggtacacatgctttacatgtgtttagtcgaggttaaaaaaacgtctaggccccccgaaccacggggacgtggttttcctttgaaaaacacgatgataatatggccacaacccatatgatggccttaccagtgaccgccttgctcctgccgctggccttgctgctccacgccgccaggccggagatcgtgatgacccagtcccccctgtccctgcccgtgacccccggcgagcccgcctccatctcctgccggtcctcccagtccctgctgcactccaacggctacaactacctggactggtacctgcagaagcccggccagtccccccagctgctgatctacctgggctccaaccgggcctccggcgtgcccgaccggttctccggctccggctccggcaccgacttcaccctgaagatctcccgggtggaggccgaggacgtgggcgtgtactactgcatgcaggccctgcagacccccaccttcggccccggcaccaaggtggacatcaagggcggcggcggctccggcggcggcggctccggcggcggcggctcccaggtgcagctggtgcagtccggcggcggcgtggtgcagcccggcaagtccctgcggctgtcctgcgccgcctccggcttcaccttctccatcttcgccatgcactgggtgcggcaggcccccggcaagggcctggagtgggtggccaccatctcctacgacggctccaacgccttctacgccgactccgtggagggccggttcaccatctcccgggacaactccaaggactccctgtacctgcagatggactccctgcggcccgaggacaccgccgtgtactactgcgtgaaggccggcgacggcggctacgacgtgttcgactcctggggccagggcaccctggtgaccgtgtcctccaccacgacgccagcgccgcgaccaccaacaccggcgcccaccatcgcgtcgcagcccctgtccctgcgcccagaggcgtgccggccagcggcggggggcgcagtgcacacgagggggctggacttcgcctgtgatatctacatctgggcgcccttggccgggacttgtggggtccttctcctgtcactggttatcaccctttactgcaaacggggcagaaagaaactcctgtatatattcaaacaaccatttatgagaccagtacaaactactcaagaggaagatggctgtagctgccgatttccagaagaagaagaaggaggatgtgaactgagagtgaagttcagcaggagcgcagacgcccccgcgtacaagcagggccagaaccagctctataacgagctcaatctaggacgaagagaggagtacgatgttttggacaagaggcgtggccgggaccctgagatggggggaaagccgagaaggaagaaccctcaggaaggcctgtacaatgaactgcagaaagataagatggcggaggcctacagtgagattgggatgaaaggcgagcgccggaggggcaaggggcacgatggcctttaccagggtctcagtacagccaccaaggacacctacgacgcccttcacatgcaggccctgccccctcgctaa

SEQ ID NO: 261 - DNA, 3536 bp, Artificial Sequence
  Synthesized
atggccttaccagtgaccgccttgctcctgccgctggccttgctgctccacgccgccaggccggacatcgtgatgacccagtccccctccagcctgacagtgacagccggcgagaaggtgacaatgatctgtaagtccagccagagcctgctgaacagcggcgaccagaagaactacctgacctggtaccagcagaagcctggccagccccccaagctgctgatcttctgggccagcacaagggagagcggcgtgcccgacagattcacaggcagcggcagcggcaccgacttcacactgaccatttcctccgtgcaggccgaggacctcgccgtgtactactgccagaacgactactcctaccccctgacattcggcgccggcaccaaactggagctgaagggtggcggtggctcgggcggtggtgggtcgggtggcggcggatctcaggtgcagctccagcagtccgatgccgagctggtgaagcccggaagcagcgtcaagatcagctgtaaggcctccggctacaccttcacagaccacgccatccactgggtgaagcagaagcccgagcagggcctggagtggatcggccactttagccccggaaacaccgacatcaagtacaacgacaagttcaagggcaaggccaccctgaccgtggacaggagcagcagcaccgcctacatgcagctgaacagcctgacaagcgaggacagcgccgtgtacttctgcaagacctccaccttcttcttcgactactggggccagggaaccaccctgacagtgtccagcaccacgacgccagcgccgcgaccaccaacaccggcgcccaccatcgcgtcgcagcccctgtccctgcgcccagaggcgtgccggccagcggcggggggcgcagtgcacacgagggggctggacttcgcctgtgatatctacatctgggcgcccttggccgggacttgtggggtccttctcctgtcactggttatcaccaaacggggcagaaagaaactcctgtatatattcaaacaaccatttatgagaccagtacaaactactcaagaggaagatggctgtagctgccgatttccagaagaagaagaaggaggatgtgaactgagagtgaagttcagcaggagcgcagacgcccccgcgtacaagcagggccagaaccagctctataacgagctcaatctaggacgaagagaggagtacgatgttttggacaagaggcgtggccgggaccctgagatggggggaaagccgagaaggaagaaccctcaggaaggcctgtacaatgaactgcagaaagataagatggcggaggcctacagtgagattgggatgaaaggcgagcgccggaggggcaaggggcacgatggcctttaccagggtctcagtacagccaccaaggacacctacgacgcccttcacatgcaggccctgccccctcgctaatctagaggcgcgcccctctccctcccccccccctaacgttactggccgaagccgcttggaataaggccggtgtgcgtttgtctatatgttattttccaccatattgccgtcttttggcaatgtgagggcccggaaacctggccctgtcttcttgacgagcattcctaggggtctttcccctctcgccaaaggaatgcaaggtctgttgaatgtcgtgaaggaagcagttcctctggaagcttcttgaagacaaacaacgtctgtagcgaccctttgcaggcagcggaaccccccacctggcgacaggtgcctctgcggccaaaagccacgtgtataagatacacctgcaaaggcggcacaaccccagtgccacgttgtgagttggatagttgtggaaagagtcaaatggctctcctcaagcgtattcaacaaggggctgaaggatgcccagaaggtaccccattgtatgggatctgatctggggcctcggtacacatgctttacatgtgtttagtcgaggttaaaaaaacgtctaggccccccgaaccacggggacgtggttttcctttgaaaaacacgatgataatatggccacaacccatatgatggccttaccagtgaccgccttgctcctgccgctggccttgctgctccacgccgccaggccggagatcgtgatgacccagtcccccctgtccctgcccgtgacccccggcgagcccgcctccatctcctgccggtcctcccagtccctgctgcactccaacggctacaactacctggactggtacctgcagaagcccggccagtccccccagctgctgatctacctgggctccaaccgggcctccggcgtgcccgaccggttctccggctccggctccggcaccgacttcaccctgaagatctcccgggtggaggccgaggacgtgggcgtgtactactgcatgcaggccctgcagacccccaccttcggccccggcaccaaggtggacatcaagggcggcggcggctccggcggcggcggctccggcggcggcggctcccaggtgcagctggtgcagtccggcggcggcgtggtgcagcccggcaagtccctgcggctgtcctgcgccgcctccggcttcaccttctccatcttcgccatgcactgggtgcggcaggcccccggcaagggcctggagtgggtggccaccatctcctacgacggctccaacgccttctacgccgactccgtggagggccggttcaccatctcccgggacaactccaaggactccctgtacctgcagatggactccctgcggcccgaggacaccgccgtgtactactgcgtgaaggccggcgacggcggctacgacgtgttcgactcctggggccagggcaccctggtgaccgtgtcctccaccacgacgccagcgccgcgaccaccaacaccggcgcccaccatcgcgtcgcagcccctgtccctgcgcccagaggcgtgccggccagcggcggggggcgcagtgcacacgagggggctggacttcgcctgtgatatctacatctgggcgcccttggccgggacttgtggggtccttctcctgtcactggttatcaccctttactgcaaacggggcagaaagaaactcctgtatatattcaaacaaccatttatgagaccagtacaaactactcaagaggaagatggctgtagctgccgatttccagaagaagaagaaggaggatgtgaactgagagtgaagttcagcaggagcgcagacgcccccgcgtacaagcagggccagaaccagctctataacgagctcaatctaggacgaagagaggagtacgatgttttggacaagaggcgtggccgggaccctgagatggggggaaagccgagaaggaagaaccctcaggaaggcctgtacaatgaactgcagaaagataagatggcggaggcctacagtgagattgggatgaaaggcgagcgccggaggggcaaggggcacgatggcctttaccagggtctcagtacagccaccaaggacacctacgacgcccttcacatgcaggccctgccccctcgctaa

SEQ ID NO: 262 - DNA, 3536 bp, Artificial Sequence
  Synthesized
atggccttaccagtgaccgccttgctcctgccgctggccttgctgctccacgccgccaggccggacatcgtgatgacccagtccccctccagcctgacagtgacagccggcgagaaggtgacaatgatctgtaagtccagccagagcctgctgaacagcggcgaccagaagaactacctgacctggtaccagcagaagcctggccagccccccaagctgctgatcttctgggccagcacaagggagagcggcgtgcccgacagattcacaggcagcggcagcggcaccgacttcacactgaccatttcctccgtgcaggccgaggacctcgccgtgtactactgccagaacgactactcctaccccctgacattcggcgccggcaccaaactggagctgaagggtggcggtggctcgggcggtggtgggtcgggtggcggcggatctcaggtgcagctccagcagtccgatgccgagctggtgaagcccggaagcagcgtcaagatcagctgtaaggcctccggctacaccttcacagaccacgccatccactgggtgaagcagaagcccgagcagggcctggagtggatcggccactttagccccggaaacaccgacatcaagtacaacgacaagttcaagggcaaggccaccctgaccgtggacaggagcagcagcaccgcctacatgcagctgaacagcctgacaagcgaggacagcgccgtgtacttctgcaagacctccaccttcttcttcgactactggggccagggaaccaccctgacagtgtccagcaccacgacgccagcgccgcgaccaccaacaccggcgcccaccatcgcgtcgcagcccctgtccctgcgcccagaggcgtgccggccagcggcggggggcgcagtgcacacgagggggctggacttcgcctgtgatatctacatctgggcgcccttggccgggacttgtggggtccttctcctgtcactggttatcaccctttactgcaaacggggcagaaagaaactcctgtatatattcaaacaaccatttatgagaccagtacaaactactcaagaggaagatggctgtagctgccgatttccagaagaagaagaaggaggatgtgaactgagagtgaagttcagcaggagcgcagacgcccccgcgtacaagcagggccagaaccagctctataacgagctcaatctaggacgaagagaggagtacgatgttttggacaagaggcgtggccgggaccctgagatggggggaaagccgagaaggaagaaccctcaggaaggcctgtacaatgaactgcagaaagataagatggcggaggcctacagtgagattgggatgaaaggcgagcgccggaggggcaaggggcacgatggcctttaccagggtctcagtacagccaccaaggacacctacgacgcccttcacatgcaggccctgccccctcgctaatctagaggcgcgcccctctccctcccccccccctaacgttactggccgaagccgcttggaataaggccggtgtgcgtttgtctatatgttattttccaccatattgccgtcttttggcaatgtgagggcccggaaacctggccctgtcttcttgacgagcattcctaggggtctttcccctctcgccaaaggaatgcaaggtctgttgaatgtcgtgaaggaagcagttcctctggaagcttcttgaagacaaacaacgtctgtagcgaccctttgcaggcagcggaaccccccacctggcgacaggtgcctctgcggccaaaagccacgtgtataagatacacctgcaaaggcggcacaaccccagtgccacgttgtgagttggatagttgtggaaagagtcaaatggctctcctcaagcgtattcaacaaggggctgaaggatgcccagaaggtaccccattgtatgggatctgatctggggcctcggtacacatgctttacatgtgtttagtcgaggttaaaaaaacgtctaggccccccgaaccacggggacgtggttttcctttgaaaaacacgatgataatatggccacaacccatatgatggccttaccagtgaccgccttgctcctgccgctggccttgctgctccacgccgccaggccggagatcgtgatgacccagtcccccctgtccctgcccgtgacccccggcgagcccgcctccatctcctgccggtcctcccagtccctgctgcactccaacggctacaactacctggactggtacctgcagaagcccggccagtccccccagctgctgatctacctgggctccaaccgggcctccggcgtgcccgaccggttctccggctccggctccggcaccgacttcaccctgaagatctcccgggtggaggccgaggacgtgggcgtgtactactgcatgcaggccctgcagacccccaccttcggccccggcaccaaggtggacatcaagggcggcggcggctccggcggcggcggctccggcggcggcggctcccaggtgcagctggtgcagtccggcggcggcgtggtgcagcccggcaagtccctgcggctgtcctgcgccgcctccggcttcaccttctccatcttcgccatgcactgggtgcggcaggcccccggcaagggcctggagtgggtggccaccatctcctacgacggctccaacgccttctacgccgactccgtggagggccggttcaccatctcccgggacaactccaaggactccctgtacctgcagatggactccctgcggcccgaggacaccgccgtgtactactgcgtgaaggccggcgacggcggctacgacgtgttcgactcctggggccagggcaccctggtgaccgtgtcctccaccacgacgccagcgccgcgaccaccaacaccggcgcccaccatcgcgtcgcagcccctgtccctgcgcccagaggcgtgccggccagcggcggggggcgcagtgcacacgagggggctggacttcgcctgtgatatctacatctgggcgcccttggccgggacttgtggggtccttctcctgtcactggttatcaccaaacggggcagaaagaaactcctgtatatattcaaacaaccatttatgagaccagtacaaactactcaagaggaagatggctgtagctgccgatttccagaagaagaagaaggaggatgtgaactgagagtgaagttcagcaggagcgcagacgcccccgcgtacaagcagggccagaaccagctctataacgagctcaatctaggacgaagagaggagtacgatgttttggacaagaggcgtggccgggaccctgagatggggggaaagccgagaaggaagaaccctcaggaaggcctgtacaatgaactgcagaaagataagatggcggaggcctacagtgagattgggatgaaaggcgagcgccggaggggcaaggggcacgatggcctttaccagggtctcagtacagccaccaaggacacctacgacgcccttcacatgcaggccctgccccctcgctaa

SEQ ID NO: 263 - DNA, 3527 bp, Artificial Sequence
  Synthesized
atggccttaccagtgaccgccttgctcctgccgctggccttgctgctccacgccgccaggccggacatcgtgatgacccagtccccctccagcctgacagtgacagccggcgagaaggtgacaatgatctgtaagtccagccagagcctgctgaacagcggcgaccagaagaactacctgacctggtaccagcagaagcctggccagccccccaagctgctgatcttctgggccagcacaagggagagcggcgtgcccgacagattcacaggcagcggcagcggcaccgacttcacactgaccatttcctccgtgcaggccgaggacctcgccgtgtactactgccagaacgactactcctaccccctgacattcggcgccggcaccaaactggagctgaagggtggcggtggctcgggcggtggtgggtcgggtggcggcggatctcaggtgcagctccagcagtccgatgccgagctggtgaagcccggaagcagcgtcaagatcagctgtaaggcctccggctacaccttcacagaccacgccatccactgggtgaagcagaagcccgagcagggcctggagtggatcggccactttagccccggaaacaccgacatcaagtacaacgacaagttcaagggcaaggccaccctgaccgtggacaggagcagcagcaccgcctacatgcagctgaacagcctgacaagcgaggacagcgccgtgtacttctgcaagacctccaccttcttcttcgactactggggccagggaaccaccctgacagtgtccagcaccacgacgccagcgccgcgaccaccaacaccggcgcccaccatcgcgtcgcagcccctgtccctgcgcccagaggcgtgccggccagcggcggggggcgcagtgcacacgagggggctggacttcgcctgtgatatctacatctgggcgcccttggccgggacttgtggggtccttctcctgtcactggttatcaccaaacggggcagaaagaaactcctgtatatattcaaacaaccatttatgagaccagtacaaactactcaagaggaagatggctgtagctgccgatttccagaagaagaagaaggaggatgtgaactgagagtgaagttcagcaggagcgcagacgcccccgcgtacaagcagggccagaaccagctctataacgagctcaatctaggacgaagagaggagtacgatgttttggacaagaggcgtggccgggaccctgagatggggggaaagccgagaaggaagaaccctcaggaaggcctgtacaatgaactgcagaaagataagatggcggaggcctacagtgagattgggatgaaaggcgagcgccggaggggcaaggggcacgatggcctttaccagggtctcagtacagccaccaaggacacctacgacgcccttcacatgcaggccctgccccctcgctaatctagaggcgcgcccctctccctcccccccccctaacgttactggccgaagccgcttggaataaggccggtgtgcgtttgtctatatgttattttccaccatattgccgtcttttggcaatgtgagggcccggaaacctggccctgtcttcttgacgagcattcctaggggtctttcccctctcgccaaaggaatgcaaggtctgttgaatgtcgtgaaggaagcagttcctctggaagcttcttgaagacaaacaacgtctgtagcgaccctttgcaggcagcggaaccccccacctggcgacaggtgcctctgcggccaaaagccacgtgtataagatacacctgcaaaggcggcacaaccccagtgccacgttgtgagttggatagttgtggaaagagtcaaatggctctcctcaagcgtattcaacaaggggctgaaggatgcccagaaggtaccccattgtatgggatctgatctggggcctcggtacacatgctttacatgtgtttagtcgaggttaaaaaaacgtctaggccccccgaaccacggggacgtggttttcctttgaaaaacacgatgataatatggccacaacccatatgatggccttaccagtgaccgccttgctcctgccgctggccttgctgctccacgccgccaggccggagatcgtgatgacccagtcccccctgtccctgcccgtgacccccggcgagcccgcctccatctcctgccggtcctcccagtccctgctgcactccaacggctacaactacctggactggtacctgcagaagcccggccagtccccccagctgctgatctacctgggctccaaccgggcctccggcgtgcccgaccggttctccggctccggctccggcaccgacttcaccctgaagatctcccgggtggaggccgaggacgtgggcgtgtactactgcatgcaggccctgcagacccccaccttcggccccggcaccaaggtggacatcaagggcggcggcggctccggcggcggcggctccggcggcggcggctcccaggtgcagctggtgcagtccggcggcggcgtggtgcagcccggcaagtccctgcggctgtcctgcgccgcctccggcttcaccttctccatcttcgccatgcactgggtgcggcaggcccccggcaagggcctggagtgggtggccaccatctcctacgacggctccaacgccttctacgccgactccgtggagggccggttcaccatctcccgggacaactccaaggactccctgtacctgcagatggactccctgcggcccgaggacaccgccgtgtactactgcgtgaaggccggcgacggcggctacgacgtgttcgactcctggggccagggcaccctggtgaccgtgtcctccaccacgacgccagcgccgcgaccaccaacaccggcgcccaccatcgcgtcgcagcccctgtccctgcgcccagaggcgtgccggccagcggcggggggcgcagtgcacacgagggggctggacttcgcctgtgatatctacatctgggcgcccttggccgggacttgtggggtccttctcctgtcactggttatcaccaaacggggcagaaagaaactcctgtatatattcaaacaaccatttatgagaccagtacaaactactcaagaggaagatggctgtagctgccgatttccagaagaagaagaaggaggatgtgaactgagagtgaagttcagcaggagcgcagacgcccccgcgtacaagcagggccagaaccagctctataacgagctcaatctaggacgaagagaggagtacgatgttttggacaagaggcgtggccgggaccctgagatggggggaaagccgagaaggaagaaccctcaggaaggcctgtacaatgaactgcagaaagataagatggcggaggcctacagtgagattgggatgaaaggcgagcgccggaggggcaaggggcacgatggcctttaccagggtctcagtacagccaccaaggacacctacgacgcccttcacatgcaggccctgccccctcgctaa

SEQ ID NO: 264 - protein, 505 aa, Artificial Sequence
  Synthezied
DIVMTQSPSSLTVTAGEKVTMICKSSQSLLNSGDQKNYLTWYQQKPGQPPKLLIFWASTRESGVPDRFTGSGSGTDFTLTISSVQAEDLAVYYCQNDYSYPLTFGAGTKLELKGGGGSGGGGSGGGGSQVQLQQSDAELVKPGSSVKISCKASGYTFTDHAIHWVKQKPEQGLEWIGHFSPGNTDIKYNDKFKGKATLTVDRSSSTAYMQLNSLTSEDSAVYFCKTSTFFFDYWGQGTTLTVSSGGGGSGGGGSGGGGSDIVMTQAAFSNPVTLGTSASISCRSSKSLLHSNGITYFFWYLQKPGLSPQLLIYQMSNLASGVPDRFSSSGSGTDFTLRISRVEAEDVGVYYCAQNLELPPTFGGGTKLEIKRAGGGGSGGGGSGGGGSEVKLVESGGGLVQPGGSMKLSCVASGFTFSNYWMNWVRQSPEKGLEWVAEIRLKSNNYTTHYAESVKGRFTISRDDSKSSVSLQMNNLRVEDTGIYYCTRHYYFDYWGQGTTLTVSS

SEQ ID NO: 265 - protein, 505 aa, Artificial Sequence
  Synthesized
DIVMTQAAFSNPVTLGTSASISCRSSKSLLHSNGITYFFWYLQKPGLSPQLLIYQMSNLASGVPDRFSSSGSGTDFTLRISRVEAEDVGVYYCAQNLELPPTFGGGTKLEIKRAGGGGSGGGGSGGGGSEVKLVESGGGLVQPGGSMKLSCVASGFTFSNYWMNWVRQSPEKGLEWVAEIRLKSNNYTTHYAESVKGRFTISRDDSKSSVSLQMNNLRVEDTGIYYCTRHYYFDYWGQGTTLTVSSGGGGSGGGGSGGGGSDIVMTQSPSSLTVTAGEKVTMICKSSQSLLNSGDQKNYLTWYQQKPGQPPKLLIFWASTRESGVPDRFTGSGSGTDFTLTISSVQAEDLAVYYCQNDYSYPLTFGAGTKLELKGGGGSGGGGSGGGGSQVQLQQSDAELVKPGSSVKISCKASGYTFTDHAIHWVKQKPEQGLEWIGHFSPGNTDIKYNDKFKGKATLTVDRSSSTAYMQLNSLTSEDSAVYFCKTSTFFFDYWGQGTTLTVSS

SEQ ID NO: 266 - protein, 69 aa, Artificial Sequence; identical to SEQ ID NO: 30
  Synthesized

SEQ ID NO: 267 - protein, 66 aa, Artificial Sequence; identical to SEQ ID NO: 29
  Synthesized

SEQ ID NO: 268 - protein, 69 aa, Artificial Sequence; identical to SEQ ID NO: 2
  Synthesized

SEQ ID NO: 269 - protein, 72 aa, Artificial Sequence; identical to SEQ ID NO: 31
  Synthezied

SEQ ID NO: 270 - protein, 728 aa, Artificial Sequence
  Synthesized
DIVMTQSPSSLTVTAGEKVTMICKSSQSLLNSGDQKNYLTWYQQKPGQPPKLLIFWASTRESGVPDRFTGSGSGTDFTLTISSVQAEDLAVYYCQNDYSYPLTFGAGTKLELKGGGGSGGGGSGGGGSQVQLQQSDAELVKPGSSVKISCKASGYTFTDHAIHWVKQKPEQGLEWIGHFSPGNTDIKYNDKFKGKATLTVDRSSSTAYMQLNSLTSEDSAVYFCKTSTFFFDYWGQGTTLTVSSGGGGSGGGGSGGGGSDIVMTQAAFSNPVTLGTSASISCRSSKSLLHSNGITYFFWYLQKPGLSPQLLIYQMSNLASGVPDRFSSSGSGTDFTLRISRVEAEDVGVYYCAQNLELPPTFGGGTKLEIKRAGGGGSGGGGSGGGGSEVKLVESGGGLVQPGGSMKLSCVASGFTFSNYWMNWVRQSPEKGLEWVAEIRLKSNNYTTHYAESVKGRFTISRDDSKSSVSLQMNNLRVEDTGIYYCTRHYYFDYWGQGTTLTVSSTTTPAPRPPTPAPTIASQPLSLRPEACRPAAGGAVHTRGLDFACDIYIWAPLAGTCGVLLLSLVITLYCKRGRKKLLYIFKQPFMRPVQTTQEEDGCSCRFPEEEEGGCELRVKFSRSADAPAYQQGQNQLYNELNLGRREEYDVLDKRRGRDPEMGGKPRRKNPQEGLYNELQKDKMAEAYSEIGMKGERRRGKGHDGLYQGLSTATKDTYDALHMQALPPR

SEQ ID NO: 271 - protein, 725 aa, Artificial Sequence
  Synthesized
DIVMTQSPSSLTVTAGEKVTMICKSSQSLLNSGDQKNYLTWYQQKPGQPPKLLIFWASTRESGVPDRFTGSGSGTDFTLTISSVQAEDLAVYYCQNDYSYPLTFGAGTKLELKGGGGSGGGGSGGGGSQVQLQQSDAELVKPGSSVKISCKASGYTFTDHAIHWVKQKPEQGLEWIGHFSPGNTDIKYNDKFKGKATLTVDRSSSTAYMQLNSLTSEDSAVYFCKTSTFFFDYWGQGTTLTVSSGGGGSGGGGSGGGGSDIVMTQAAFSNPVTLGTSASISCRSSKSLLHSNGITYFFWYLQKPGLSPQLLIYQMSNLASGVPDRFSSSGSGTDFTLRISRVEAEDVGVYYCAQNLELPPTFGGGTKLEIKRAGGGGSGGGGSGGGGSEVKLVESGGGLVQPGGSMKLSCVASGFTFSNYWMNWVRQSPEKGLEWVAEIRLKSNNYTTHYAESVKGRFTISRDDSKSSVSLQMNNLRVEDTGIYYCTRHYYFDYWGQGTTLTVSSTTTPAPRPPTPAPTIASQPLSLRPEACRPAAGGAVHTRGLDFACDIYIWAPLAGTCGVLLLSLVITKRGRKKLLYIFKQPFMRPVQTTQEEDGCSCRFPEEEEGGCELRVKFSRSADAPAYQQGQNQLYNELNLGRREEYDVLDKRRGRDPEMGGKPRRKNPQEGLYNELQKDKMAEAYSEIGMKGERRRGKGHDGLYQGLSTATKDTYDALHMQALPPR

SEQ ID NO: 272 - protein, 728 aa, Artificial Sequence
  Synthesized
DIVMTQSPSSLTVTAGEKVTMICKSSQSLLNSGDQKNYLTWYQQKPGQPPKLLIFWASTRESGVPDRFTGSGSGTDFTLTISSVQAEDLAVYYCQNDYSYPLTFGAGTKLELKGGGGSGGGGSGGGGSQVQLQQSDAELVKPGSSVKISCKASGYTFTDHAIHWVKQKPEQGLEWIGHFSPGNTDIKYNDKFKGKATLTVDRSSSTAYMQLNSLTSEDSAVYFCKTSTFFFDYWGQGTTLTVSSGGGGSGGGGSGGGGSDIVMTQAAFSNPVTLGTSASISCRSSKSLLHSNGITYFFWYLQKPGLSPQLLIYQMSNLASGVPDRFSSSGSGTDFTLRISRVEAEDVGVYYCAQNLELPPTFGGGTKLEIKRAGGGGSGGGGSGGGGSEVKLVESGGGLVQPGGSMKLSCVASGFTFSNYWMNWVRQSPEKGLEWVAEIRLKSNNYTTHYAESVKGRFTISRDDSKSSVSLQMNNLRVEDTGIYYCTRHYYFDYWGQGTTLTVSSAKPTTTPAPRPPTPAPTIASQPLSLRPEACRPAAGGAVHTRGLDFACDIYIWAPLAGTCGVLLLSLVITKRGRKKLLYIFKQPFMRPVQTTQEEDGCSCRFPEEEEGGCELRVKFSRSADAPAYQQGQNQLYNELNLGRREEYDVLDKRRGRDPEMGGKPRRKNPQEGLYNELQKDKMAEAYSEIGMKGERRRGKGHDGLYQGLSTATKDTYDALHMQALPPR

SEQ ID NO: 273 - protein, 731 aa, Artificial Sequence
  Synthezied
DIVMTQSPSSLTVTAGEKVTMICKSSQSLLNSGDQKNYLTWYQQKPGQPPKLLIFWASTRESGVPDRFTGSGSGTDFTLTISSVQAEDLAVYYCQNDYSYPLTFGAGTKLELKGGGGSGGGGSGGGGSQVQLQQSDAELVKPGSSVKISCKASGYTFTDHAIHWVKQKPEQGLEWIGHFSPGNTDIKYNDKFKGKATLTVDRSSSTAYMQLNSLTSEDSAVYFCKTSTFFFDYWGQGTTLTVSSGGGGSGGGGSGGGGSDIVMTQAAFSNPVTLGTSASISCRSSKSLLHSNGITYFFWYLQKPGLSPQLLIYQMSNLASGVPDRFSSSGSGTDFTLRISRVEAEDVGVYYCAQNLELPPTFGGGTKLEIKRAGGGGSGGGGSGGGGSEVKLVESGGGLVQPGGSMKLSCVASGFTFSNYWMNWVRQSPEKGLEWVAEIRLKSNNYTTHYAESVKGRFTISRDDSKSSVSLQMNNLRVEDTGIYYCTRHYYFDYWGQGTTLTVSSAKPTTTPAPRPPTPAPTIASQPLSLRPEACRPAAGGAVHTRGLDFACDIYIWAPLAGTCGVLLLSLVITLYCKRGRKKLLYIFKQPFMRPVQTTQEEDGCSCRFPEEEEGGCELRVKFSRSADAPAYQQGQNQLYNELNLGRREEYDVLDKRRGRDPEMGGKPRRKNPQEGLYNELQKDKMAEAYSEIGMKGERRRGKGHDGLYQGLSTATKDTYDALHMQALPPR

SEQ ID NO: 274 - protein, 728 aa, Artificial Sequence
  Synthezied
DIVMTQAAFSNPVTLGTSASISCRSSKSLLHSNGITYFFWYLQKPGLSPQLLIYQMSNLASGVPDRFSSSGSGTDFTLRISRVEAEDVGVYYCAQNLELPPTFGGGTKLEIKRAGGGGSGGGGSGGGGSEVKLVESGGGLVQPGGSMKLSCVASGFTFSNYWMNWVRQSPEKGLEWVAEIRLKSNNYTTHYAESVKGRFTISRDDSKSSVSLQMNNLRVEDTGIYYCTRHYYFDYWGQGTTLTVSSGGGGSGGGGSGGGGSDIVMTQSPSSLTVTAGEKVTMICKSSQSLLNSGDQKNYLTWYQQKPGQPPKLLIFWASTRESGVPDRFTGSGSGTDFTLTISSVQAEDLAVYYCQNDYSYPLTFGAGTKLELKGGGGSGGGGSGGGGSQVQLQQSDAELVKPGSSVKISCKASGYTFTDHAIHWVKQKPEQGLEWIGHFSPGNTDIKYNDKFKGKATLTVDRSSSTAYMQLNSLTSEDSAVYFCKTSTFFFDYWGQGTTLTVSSTTTPAPRPPTPAPTIASQPLSLRPEACRPAAGGAVHTRGLDFACDIYIWAPLAGTCGVLLLSLVITLYCKRGRKKLLYIFKQPFMRPVQTTQEEDGCSCRFPEEEEGGCELRVKFSRSADAPAYQQGQNQLYNELNLGRREEYDVLDKRRGRDPEMGGKPRRKNPQEGLYNELQKDKMAEAYSEIGMKGERRRGKGHDGLYQGLSTATKDTYDALHMQALPPR

SEQ ID NO: 275 - protein, 725 aa, Artificial Sequence
  Synthezied
DIVMTQAAFSNPVTLGTSASISCRSSKSLLHSNGITYFFWYLQKPGLSPQLLIYQMSNLASGVPDRFSSSGSGTDFTLRISRVEAEDVGVYYCAQNLELPPTFGGGTKLEIKRAGGGGSGGGGSGGGGSEVKLVESGGGLVQPGGSMKLSCVASGFTFSNYWMNWVRQSPEKGLEWVAEIRLKSNNYTTHYAESVKGRFTISRDDSKSSVSLQMNNLRVEDTGIYYCTRHYYFDYWGQGTTLTVSSGGGGSGGGGSGGGGSDIVMTQSPSSLTVTAGEKVTMICKSSQSLLNSGDQKNYLTWYQQKPGQPPKLLIFWASTRESGVPDRFTGSGSGTDFTLTISSVQAEDLAVYYCQNDYSYPLTFGAGTKLELKGGGGSGGGGSGGGGSQVQLQQSDAELVKPGSSVKISCKASGYTFTDHAIHWVKQKPEQGLEWIGHFSPGNTDIKYNDKFKGKATLTVDRSSSTAYMQLNSLTSEDSAVYFCKTSTFFFDYWGQGTTLTVSSTTTPAPRPPTPAPTIASQPLSLRPEACRPAAGGAVHTRGLDFACDIYIWAPLAGTCGVLLLSLVITKRGRKKLLYIFKQPFMRPVQTTQEEDGCSCRFPEEEEGGCELRVKFSRSADAPAYQQGQNQLYNELNLGRREEYDVLDKRRGRDPEMGGKPRRKNPQEGLYNELQKDKMAEAYSEIGMKGERRRGKGHDGLYQGLSTATKDTYDALHMQALPPR

SEQ ID NO: 276 - protein, 728 aa, Artificial Sequence
  Synthezied
DIVMTQAAFSNPVTLGTSASISCRSSKSLLHSNGITYFFWYLQKPGLSPQLLIYQMSNLASGVPDRFSSSGSGTDFTLRISRVEAEDVGVYYCAQNLELPPTFGGGTKLEIKRAGGGGSGGGGSGGGGSEVKLVESGGGLVQPGGSMKLSCVASGFTFSNYWMNWVRQSPEKGLEWVAEIRLKSNNYTTHYAESVKGRFTISRDDSKSSVSLQMNNLRVEDTGIYYCTRHYYFDYWGQGTTLTVSSGGGGSGGGGSGGGGSDIVMTQSPSSLTVTAGEKVTMICKSSQSLLNSGDQKNYLTWYQQKPGQPPKLLIFWASTRESGVPDRFTGSGSGTDFTLTISSVQAEDLAVYYCQNDYSYPLTFGAGTKLELKGGGGSGGGGSGGGGSQVQLQQSDAELVKPGSSVKISCKASGYTFTDHAIHWVKQKPEQGLEWIGHFSPGNTDIKYNDKFKGKATLTVDRSSSTAYMQLNSLTSEDSAVYFCKTSTFFFDYWGQGTTLTVSSAKPTTTPAPRPPTPAPTIASQPLSLRPEACRPAAGGAVHTRGLDFACDIYIWAPLAGTCGVLLLSLVITKRGRKKLLYIFKQPFMRPVQTTQEEDGCSCRFPEEEEGGCELRVKFSRSADAPAYQQGQNQLYNELNLGRREEYDVLDKRRGRDPEMGGKPRRKNPQEGLYNELQKDKMAEAYSEIGMKGERRRGKGHDGLYQGLSTATKDTYDALHMQALPPR

SEQ ID NO: 277 - protein, 731 aa, Artificial Sequence
  Synthesized
DIVMTQAAFSNPVTLGTSASISCRSSKSLLHSNGITYFFWYLQKPGLSPQLLIYQMSNLASGVPDRFSSSGSGTDFTLRISRVEAEDVGVYYCAQNLELPPTFGGGTKLEIKRAGGGGSGGGGSGGGGSEVKLVESGGGLVQPGGSMKLSCVASGFTFSNYWMNWVRQSPEKGLEWVAEIRLKSNNYTTHYAESVKGRFTISRDDSKSSVSLQMNNLRVEDTGIYYCTRHYYFDYWGQGTTLTVSSGGGGSGGGGSGGGGSDIVMTQSPSSLTVTAGEKVTMICKSSQSLLNSGDQKNYLTWYQQKPGQPPKLLIFWASTRESGVPDRFTGSGSGTDFTLTISSVQAEDLAVYYCQNDYSYPLTFGAGTKLELKGGGGSGGGGSGGGGSQVQLQQSDAELVKPGSSVKISCKASGYTFTDHAIHWVKQKPEQGLEWIGHFSPGNTDIKYNDKFKGKATLTVDRSSSTAYMQLNSLTSEDSAVYFCKTSTFFFDYWGQGTTLTVSSAKPTTTPAPRPPTPAPTIASQPLSLRPEACRPAAGGAVHTRGLDFACDIYIWAPLAGTCGVLLLSLVITLYCKRGRKKLLYIFKQPFMRPVQTTQEEDGCSCRFPEEEEGGCELRVKFSRSADAPAYQQGQNQLYNELNLGRREEYDVLDKRRGRDPEMGGKPRRKNPQEGLYNELQKDKMAEAYSEIGMKGERRRGKGHDGLYQGLSTATKDTYDALHMQALPPR

SEQ ID NO: 278 - protein, 5 aa, Artificial Sequence
  Synthesized
GGGGS

SEQ ID NO: 279 - DNA, 1470 bp, Artificial Sequence
  Synthesized
atggccttaccagtgaccgccttgctcctgccgctggccttgctgctccacgccgccaggccgcagtccgtgctgacccagccaccttccgtgtctgccgctccaggccagaaggtgacaatcagctgctccggcagctcctctgacatcggaagcaactacgtgtcctggtaccagcagttcccaggcaccgcccccaagctgctgatctacgacaacaacaagaggcctagcgccatcccagatagattttctggcagcaagtccggaacctccgccacactgggcatcaccggactgcagacaggcgacgaggctgattactactgcggcacatgggattccaggctgggaatcgccgtgttcggaggaggaacccagctgacagtgctgggcggaggaggaggaagcggaggaggaggatccggaggaggaggatctgaggtgcagctggtgcagtctggcgccgaggtgaagaagcctggacagtctctgaagatcagctgtaaggcttccggctactctctgaccgacaactggatcggatgggtgcggcagaagccaggcaagggactggagtggatgggcatcatctacccaggagactctgatacacgctactctcccagctttcagggccaggtgaccatctccgccgataagtctatcaacacagcttacctgcagtggagctccctgaaggccagcgacaccgctatctactactgcgtgggcctggattggaactacaacccactgaggtactggggacctggaaccctggtgacagtgtctagcaccacgacgccagcgccgcgaccaccaacaccggcgcccaccatcgcgtcgcagcccctgtccctgcgcccagaggcgtgccggccagcggcggggggcgcagtgcacacgagggggctggacttcgcctgtgatatctacatctgggcgcccttggccgggacttgtggggtccttctcctgtcactggttatcaccctttactgcaaacggggcagaaagaaactcctgtatatattcaaacaaccatttatgagaccagtacaaactactcaagaggaagatggctgtagctgccgatttccagaagaagaagaaggaggatgtgaactgagagtgaagttcagcaggagcgcagacgcccccgcgtacaagcagggccagaaccagctctataacgagctcaatctaggacgaagagaggagtacgatgttttggacaagaggcgtggccgggaccctgagatggggggaaagccgagaaggaagaaccctcaggaaggcctgtacaatgaactgcagaaagataagatggcggaggcctacagtgagattgggatgaaaggcgagcgccggaggggcaaggggcacgatggcctttaccagggtctcagtacagccaccaaggacacctacgacgcccttcacatgcaggccctgccccctcgctaa

SEQ ID NO: 280 - protein, 69 aa, Homo sapiens; identical to SEQ ID NO: 30

SEQ ID NO: 281 - protein, 24 aa, Homo sapiens
IYIWAPLAGTCGVLLLSLVITLYC

SEQ ID NO: 282 - protein, 254 aa, Homo sapiens
ESKYGPPCPPCPAPEFLGGPSVFLFPPKPKDTLMISRTPEVTCVVVDVSQEDPEVQFNWYVDGVEVHNAKTKPREEQFNSTYRVVSVLTVLHQDWLNGKEYKCKVSNKGLPSSIEKTISKAKGQPREPQVYTLPPSQEEMTKNQVSLTCLVKGFYPSDIAVEWESNGQPENNYKTTPPVLDSDGSFFLYSRLTVDKSRWQEGNVFSCSVMHEALHNHYTQKSLSLSLGKMIYIWAPLAGTCGVLLLSLVITLYC

SEQ ID NO: 283 - DNA, 462 bp, Homo sapiens
atgtacaggatgcaactcctgtcttgcattgcactaagtcttgcacttgtcacaaacagtgcacctacttcaagttctacaaagaaaacacagctacaactggagcatttactgctggatttacagatgattttgaatggaattaataattacaagaatcccaaactcaccaggatgctcacatttaagttttacatgcccaagaaggccacagaactgaaacatcttcagtgtctagaagaagaactcaaacctctggaggaagtgctaaatttagctcaaagcaaaaactttcacttaagacccagggacttaatcagcaatatcaacgtaatagttctggaactaaagggatctgaaacaacattcatgtgtgaatatgctgatgagacagcaaccattgtagaatttctgaacagatggattaccttttgtcaaagcatcatctcaacactgacttga

SEQ ID NO: 284 - DNA, 10179 bp, Homo sapiens
cggctccggtgcccgtcagtgggcagagcgcacatcgcccacagtccccgagaagttggggggaggggtcggcaattgaaccggtgcctagagaaggtggcgcggggtaaactgggaaagtgatgtcgtgtactggctccgcctttttcccgagggtgggggagaaccgtatataagtgcagtagtcgccgtgaacgttctttttcgcaacgggtttgccgccagaacacaggatccgccaccatggccttaccagtgaccgccttgctcctgccgctggccttgctgctccacgccgccaggccggatatccagatgacccagagcccgagcagcctgagcgcgagcgtgggtgatcgcgtgaccattacctgcagggcaagtcaggacattagtaaatatttaaattggtatcagcagaaaccgggtaaagcgccgaaactgttaatttatcatacatcaagattacactcaggcgtgccgtcgcgttttagcggctcgggttcgggcaccgattttaccctgaccatctcgagcttgcagccggaggacttcgccacctactattgccaacagggtaatacgcttccgtacacgttcggtcagggcaccaaagtggagatcaaaggtggcggtggctcgggcggtggtgggtcgggtggcggcggatctgaggtgcagctggtggagtctgggggaggcttggtacagcctggggggtccctgagactctcctgtgcagcctctggagtgtccctgcctgattatggcgtgtcctgggtccgccaggctccagggaaggggctggagtgggtttcagtgatctggggcagcgagacaacctactacaacagcgccctgaagtcccgattcaccatctccagagacaatgccaagaactcactgtatctgcaaatgaacagcctgagagccgaggacacggctgtgtattactgtgcgaagcactactactacggcggcagctacgctatggactactggggccaaggaaccctggtcaccgtgtcctcaaccacgacgccagcgccgcgaccaccaacaccggcgcccaccatcgcgtcgcagcccctgtccctgcgcccagaggcgtgccggccagcggcggggggcgcagtgcacacgagggggctggacttcgcctgtgatatctacatctgggcgcccttggccgggacttgtggggtccttctcctgtcactggttatcaccctttactgcaaacggggcagaaagaaactcctgtatatattcaaacaaccatttatgagaccagtacaaactactcaagaggaagatggctgtagctgccgatttccagaagaagaagaaggaggatgtgaactgagagtgaagttcagcaggagcgcagacgcccccgcgtaccagcagggccagaaccagctctataacgagctcaatctaggacgaagagaggagtacgatgttttggacaagaggcgtggccgggaccctgagatggggggaaagccgagaaggaagaaccctcaggaaggcctgtacaatgaactgcagaaagataagatggcggaggcctacagtgagattgggatgaaaggcgagcgccggaggggcaaggggcacgatggcctttaccagggtctcagtacagccaccaaggacacctacgacgcccttcacatgcaggccctgccccctcgctaagtcgactctagaactagtaatcaacctctggattacaaaatttgtgaaagattgactggtattcttaactatgttgctccttttacgctatgtggatacgctgctttaatgcctttgtatcatgctattgcttcccgtatggctttcattttctcctccttgtataaatcctggttgctgtctctttatgaggagttgtggcccgttgtcaggcaacgtggcgtggtgtgcactgtgtttgctgacgcaacccccactggttggggcattgccaccacctgtcagctcctttccgggactttcgctttccccctccctattgccacggcggaactcatcgccgcctgccttgcccgctgctggacaggggctcggctgttgggcactgacaattccgtggtgttgtcggggaagctgacgtcctttccatggctgctcgcctgtgttgccacctggattctgcgcgggacgtccttctgctacgtcccttcggccctcaatccagcggaccttccttcccgcggcctgctgccggctctgcggcctcttccgcgtcttcgccttcgccctcagacgagtcggatctccctttgggccgcctccccgcctgccgcggaattcgagctcggtacctttaagaccaatgacttacaaggcagctgtagatcttagccactttttaaaagaaaaggggggactggaagggctaattcactcccaacgaagacaagatctgctttttgcttgtactgggtctctctggttagaccagatctgagcctgggagctctctggctaactagggaacccactgcttaagcctcaataaagcttgccttgagtgcttcaagtagtgtgtgcccgtctgttgtgtgactctggtaactagagatccctcagacccttttagtcagtgtggaaaatctctagcagtagtagttcatgtcatcttattattcagtatttataacttgcaaagaaatgaatatcagagagtgagaggaacttgtttattgcagcttataatggttacaaataaagcaatagcatcacaaatttcacaaataaagcatttttttcactgcattctagttgtggtttgtccaaactcatcaatgtatcttatcatgtctggctctagctatcccgcccctaactccgcccatcccgcccctaactccgcccagttccgcccattctccgccccatggctgactaattttttttatttatgcagaggccgaggccgcctcggcctctgagctattccagaagtagtgaggaggcttttttggaggcctagggacgtacccaattcgccctatagtgagtcgtattacgcgcgctcactggccgtcgttttacaacgtcgtgactgggaaaaccctggcgttacccaacttaatcgccttgcagcacatccccctttcgccagctggcgtaatagcgaagaggcccgcaccgatcgcccttcccaacagttgcgcagcctgaatggcgaatgggacgcgccctgtagcggcgcattaagcgcggcgggtgtggtggttacgcgcagcgtgaccgctacacttgccagcgccctagcgcccgctcctttcgctttcttcccttcctttctcgccacgttcgccggctttccccgtcaagctctaaatcgggggctccctttagggttccgatttagtgctttacggcacctcgaccccaaaaaacttgattagggtgatggttcacgtagtgggccatcgccctgatagacggtttttcgccctttgacgttggagtccacgttctttaatagtggactcttgttccaaactggaacaacactcaaccctatctcggtctattcttttgatttataagggattttgccgatttcggcctattggttaaaaaatgagctgatttaacaaaaatttaacgcgaattttaacaaaatattaacgcttacaatttgaagatcctttgatcttttctacggggtctgacgctcagtggaacgaaaactcacgttaagggattttggtcatgaacaataaaactgtctgcttacataaacagtaatacaaggggtgttatgagccatattcaacgggaaacgtcttgctctaggccgcgattaaattccaacatggatgctgatttatatgggtataaatgggctcgcgataatgtcgggcaatcaggtgcgacaatctatcgattgtatgggaagcccgatgcgccagagttgtttctgaaacatggcaaaggtagcgttgccaatgatgttacagatgagatggtcagactaaactggctgacggaatttatgcctcttccgaccatcaagcattttatccgtactcctgatgatgcatggttactcaccactgcgatccccgggaaaacagcattccaggtattagaagaatatcctgattcaggtgaaaatattgttgatgcgctggcagtgttcctgcgccggttgcattcgattcctgtttgtaattgtccttttaacagcgatcgcgtatttcgtctggctcaggcgcaatcacgaatgaataacggtttggttgatgcgagtgattttgatgacgagcgtaatggctggcctgttgaacaagtctggaaagaaatgcataaacttttgccattctcaccggattcagtcgtcactcatggtgatttctcacttgataaccttatttttgacgaggggaaattaataggttgtattgatgttggacgagtcggaatcgcagaccgataccaggatcttgccatcctatggaactgcctcggtgagttttctccttcattacagaaacggctttttcaaaaatatggtattgataatcctgatatgaataaattgcagtttcatttgatgctcgatgagtttttctaactgtcagaccaagtttactcatatatactttagattgatttaaaacttcatttttaatttaaaaggatctaggtgaagatcctttttgataatctcatgaccaaaatcccttaacgtgagttttcgttccactgagcgtcagaccccgtagaaaagatcaaaggatcttcttgagatcctttttttctgcgcgtaatctgctgcttgcaaacaaaaaaaccaccgctaccagcggtggtttgtttgccggatcaagagctaccaactctttttccgaaggtaactggcttcagcagagcgcagataccaaatactgttcttctagtgtagccgtagttaggccaccacttcaagaactctgtagcaccgcctacatacctcgctctgctaatcctgttaccagtggctgctgccagtggcgataagtcgtgtcttaccgggttggactcaagacgatagttaccggataaggcgcagcggtcgggctgaacggggggttcgtgcacacagcccagcttggagcgaacgacctacaccgaactgagatacctacagcgtgagctatgagaaagcgccacgcttcccgaagggagaaaggcggacaggtatccggtaagcggcagggtcggaacaggagagcgcacgagggagcttccagggggaaacgcctggtatctttatagtcctgtcgggtttcgccacctctgacttgagcgtcgatttttgtgatgctcgtcaggggggcggagcctatggaaaaacgccagcaacgcggcctttttacggttcctggccttttgctggccttttgctcacatgttctttcctgcgttatcccctgattctgtggataaccgtattaccgcctttgagtgagctgataccgctcgccgcagccgaacgaccgagcgcagcgagtcagtgagcgaggaagcggaagagcgcccaatacgcaaaccgcctctccccgcgcgttggccgattcattaatgcagctggcacgacaggtttcccgactggaaagcgggcagtgagcgcaacgcaattaatgtgagttagctcactcattaggcaccccaggctttacactttatgcttccggctcgtatgttgtgtggaattgtgagcggataacaatttcacacaggaaacagctatgaccatgattacgccaagcgcgcaattaaccctcactaaagggaacaaaagctggagctgcaagcttaatgtagtcttatgcaatactcttgtagtcttgcaacatggtaacgatgagttagcaacatgccttacaaggagagaaaaagcaccgtgcatgccgattggtggaagtaaggtggtacgatcgtgccttattaggaaggcaacagacgggtctgacatggattggacgaaccactgaattgccgcattgcagagatattgtatttaagtgcctagctcgatacataaacgggtctctctggttagaccagatctgagcctgggagctctctggctaactagggaacccactgcttaagcctcaataaagcttgccttgagtgcttcaagtagtgtgtgcccgtctgttgtgtgactctggtaactagagatccctcagacccttttagtcagtgtggaaaatctctagcagtggcgcccgaacagggacttgaaagcgaaagggaaaccagaggagctctctcgacgcaggactcggcttgctgaagcgcgcacggcaagaggcgaggggcggcgactggtgagtacgccaaaaattttgactagcggaggctagaaggagagagatgggtgcgagagcgtcagtattaagcgggggagaattagatcgcgatgggaaaaaattcggttaaggccagggggaaagaaaaaatataaattaaaacatatagtatgggcaagcagggagctagaacgattcgcagttaatcctggcctgttagaaacatcagaaggctgtagacaaatactgggacagctacaaccatcccttcagacaggatcagaagaacttagatcattatataatacagtagcaaccctctattgtgtgcatcaaaggatagagataaaagacaccaaggaagctttagacaagatagaggaagagcaaaacaaaagtaagaccaccgcacagcaagcggccgctgatcttcagacctggaggaggagatatgagggacaattggagaagtgaattatataaatataaagtagtaaaaattgaaccattaggagtagcacccaccaaggcaaagagaagagtggtgcagagagaaaaaagagcagtgggaataggagctttgttccttgggttcttgggagcagcaggaagcactatgggcgcagcgtcaatgacgctgacggtacaggccagacaattattgtctggtatagtgcagcagcagaacaatttgctgagggctattgaggcgcaacagcatctgttgcaactcacagtctggggcatcaagcagctccaggcaagaatcctggctgtggaaagatacctaaaggatcaacagctcctggggatttggggttgctctggaaaactcatttgcaccactgctgtgccttggaatgctagttggagtaataaatctctggaacagatttggaatcacacgacctggatggagtgggacagagaaattaacaattacacaagcttaatacactccttaattgaagaatcgcaaaaccagcaagaaaagaatgaacaagaattattggaattagataaatgggcaagtttgtggaattggtttaacataacaaattggctgtggtatataaaattattcataatgatagtaggaggcttggtaggtttaagaatagtttttgctgtactttctatagtgaatagagttaggcagggatattcaccattatcgtttcagacccacctcccaaccccgaggggacccgacaggcccgaaggaatagaagaagaaggtggagagagagacagagacagatccattcgattagtgaacggatctcgacggtatcgatcacgagactagcctcgacacaaatggcagtattcatccacaattttaaaagaaaaggggggattggggggtacagtgcaggggaaagaatagtagacataatagcaacagacatacaaactaaagaattacaaaaacaaattacaaaaattcaaaattttcgggtttattacagggacagcagagatccagtttatcgacttaacttgtttattgcagcttataatggttacaaataaggcaatagcatcacaaatttcacaaataaggcatttttttcactgcattctagttttggtttgtccaaactcatcaatgtatcttatcatgtctggatctcaaatccctcggaagctgcgcctgtcttaggttggagtgatacatttttatcacttttacccgtctttggattaggcagtagctctgacggccctcctgtcttaggttagtgaaaaatgtcactctcttacccgtcattggctgtccagcttagctcgcaggggaggtggtcttcatcagctggcgttcaggtagctcatcacccggtcgatggtcacggcccggatccggaaggcatgcaggaggatgcacagcttgatcttggtcttgtagaagtcgggctcttccaggctggacttctggggcactgtctcgctgttgaagttcagggcctgcatcagctcgtcgatcacggccagcatgttctgatccaggaagatctgccgcttggggtccatcagcagcttggcgttcatggtcttgaactccacctggtacatcttcaggtcctcgtagatgctgctcaggcacagggccatcatgaagctggtctttctgctggccaggcaagagccgttggtgatgaagcttgtctcccgagagttcagacagctctcgttcttggtcagttccaggggcaggcaggcctccacggtgctggtcttatccttggtgatgtcctcgtggtcgatttcctcgctggtgcaggggtagaattccagggtctgccgggccttctgcagcatgttgctcacggcccgcagcaggttctggctgtggtgcaggcaggggaacatgccggggtcgggggtagccacgggcaggttccggcttcctccgccccctccgccgctgcagggcacgctggcccactcggaccaggagctgctgtagtaccggtcctgggcccgcacgctgatgctggcgttcttccggcagatcacggtggcgctggtcttgtcggtgaacacccggtctttcttctcccgcttgctcttgccctgcacctgcacacagaaggtcaggctgaagtagctgtggggggtggaccaggtgtcagggtactcccaggacacctccacctgccggctgttcttcaggggcttcagctgcaggttcttgggggggtcgggcttgatgatgtcccggatgaaaaagctggaggtgtagttctcgtacttcagcttgtgcacggcgtccaccatcacctcgatgggcaggctttcctcggcggcagggcaggcgctatcttcctggcactcgacgctgtactcgtactctttgttgtcgccccgcactctctcggcgctcagggtggcggctccgcaggtcacgccctgagggtcgctgctgccccggctgctcttcacgctgaaggtcaggtcggtgctgatggtggtcagccaccaacaggtgaaccggccgctgtagttcttggcctcgcaccgcaggaaggtcttgttcttgggctctttctggtccttcaggatgtcggtggaccagatgccatcctctttcttgtgcagcagcagcaggctgtgggacagcacttcgccgcccttgtggcaggtgtactggccggcgtcgccgaactctttgacctggatggtcagggtcttgccgctgcccagcacctcgctgctctggtccagggtccaggtgatgccgtcctcttcgggggtgtcgcaggtcagcaccaccatctcgccaggggcgtcgggataccagtccagctccaccacgtacacgtctttcttcagctcccagatggccaccagggggctggccaggaacaccaggctgaaccagctgatgaccagctgctgatgacacatggtggccaggagttgaggttactgtgagtagtgattaaagagagtgatagggaactcttgaacaagagatgcaatttatactgttaattctggaaaaatattatgggggtgtcaaaatgtcccgggaccaattgacgccttctgtatgaaacagtttttcctcctaattgacgccttctgtatgaaacagtttttcctcctaattgacgccttctgtatgaaacagtttttcctcctaattcgatgggaccaattgacgccttctgtatgaaacagtttttcctcctaattgacgccttctgtatgaaacagtttttcctcctaattgacgccttctgtatgaaacagtttttcctcctaattcgatatcaagcttatcgataccgtcgacctcgatgaattcgctagcaaatccactttggctcgagaagcttgatat

SEQ ID NO: 285 - protein, 153 aa, Homo sapiens
MYRMQLLSCIALSLALVTNSAPTSSSTKKTQLQLEHLLLDLQMILNGINNYKNPKLTRMLTFKFYMPKKATELKHLQCLEEELKPLEEVLNLAQSKNFHLRPRDLISNINVIVLELKGSETTFMCEYADETATIVEFLNRWITFCQSIISTLT

SEQ ID NO: 286 - DNA, 639 bp, Homo sapiens
atgaactccttctccacaagcgccttcggtccagttgccttctccctggggctgctcctggtgttgcctgctgccttccctgccccagtacccccaggagaagattccaaagatgtagccgccccacacagacagccactcacctcttcagaacgaattgacaaacaaattcggtacatcctcgacggcatctcagccctgagaaaggagacatgtaacaagagtaacatgtgtgaaagcagcaaagaggcactggcagaaaacaacctgaaccttccaaagatggctgaaaaagatggatgcttccaatctggattcaatgaggagacttgcctggtgaaaatcatcactggtcttttggagtttgaggtatacctagagtacctccagaacagatttgagagtagtgaggaacaagccagagctgtgcagatgagtacaaaagtcctgatccagttcctgcagaaaaaggcaaagaatctagatgcaataaccacccctgacccaaccacaaatgccagcctgctgacgaagctgcaggcacagaaccagtggctgcaggacatgacaactcatctcattctgcgcagctttaaggagttcctgcagtccagcctgagggctcttcggcaaatgtag

SEQ ID NO: 287 - protein, 212 aa, Homo sapiens
MNSFSTSAFGPVAFSLGLLLVLPAAFPAPVPPGEDSKDVAAPHRQPLTSSERIDKQIRYILDGISALRKETCNKSNMCESSKEALAENNLNLPKMAEKDGCFQSGFNEETCLVKIITGLLEFEVYLEYLQNRFESSEEQARAVQMSTKVLIQFLQKKAKNLDAITTPDPTTNASLLTKLQAQNQWLQDMTTHLILRSFKEFLQSSLRALRQM

SEQ ID NO: 288 - DNA, 534 bp, Homo sapiens
atgttccatgtttcttttaggtatatctttggacttcctcccctgatccttgttctgttgccagtagcatcatctgattgtgatattgaaggtaaagatggcaaacaatatgagagtgttctaatggtcagcatcgatcaattattggacagcatgaaagaaattggtagcaattgcctgaataatgaatttaacttttttaaaagacatatctgtgatgctaataaggaaggtatgtttttattccgtgctgctcgcaagttgaggcaatttcttaaaatgaatagcactggtgattttgatctccacttattaaaagtttcagaaggcacaacaatactgttgaactgcactggccaggttaaaggaagaaaaccagctgccctgggtgaagcccaaccaacaaagagtttggaagaaaataaatctttaaaggaacagaaaaaactgaatgacttgtgtttcctaaagagactattacaagagataaaaacttgttggaataaaattttgatgggcactaaagaacactga

SEQ ID NO: 289 - protein, 177 aa, Homo sapiens
MFHVSFRYIFGLPPLILVLLPVASSDCDIEGKDGKQYESVLMVSIDQLLDSMKEIGSNCLNNEFNFFKRHICDANKEGMFLFRAARKLRQFLKMNSTGDFDLHLLKVSEGTTILLNCTGQVKGRKPAALGEAQPTKSLEENKSLKEQKKLNDLCFLKRLLQEIKTCWNKILMGTKEH

SEQ ID NO: 290 - DNA, 489 bp, Homo sapiens
atgagaatttcgaaaccacatttgagaagtatttccatccagtgctacttgtgtttacttctaaacagtcattttctaactgaagctggcattcatgtcttcattttgggctgtttcagtgcagggcttcctaaaacagaagccaactgggtgaatgtaataagtgatttgaaaaaaattgaagatcttattcaatctatgcatattgatgctactttatatacggaaagtgatgttcaccccagttgcaaagtaacagcaatgaagtgctttctcttggagttacaagttatttcacttgagtccggagatgcaagtattcatgatacagtagaaaatctgatcatcctagcaaacaacagtttgtcttctaatgggaatgtaacagaatctggatgcaaagaatgtgaggaactggaggaaaaaaatattaaagaatttttgcagagttttgtacatattgtccaaatgttcatcaacacttcttga

SEQ ID NO: 291 - protein, 162 aa, Homo sapiens
MRISKPHLRSISIQCYLCLLLNSHFLTEAGIHVFILGCFSAGLPKTEANWVNVISDLKKIEDLIQSMHIDATLYTESDVHPSCKVTAMKCFLLELQVISLESGDASIHDTVENLIILANNSLSSNGNVTESGCKECEELEEKNIKEFLQSFVHIVQMFINTS

SEQ ID NO: 292 - DNA, 468 bp, Homo sapiens
atgactcctgggaagacctcattggtgtcactgctactgctgctgagcctggaggccatagtgaaggcaggaatcacaatcccacgaaatccaggatgcccaaattctgaggacaagaacttcccccggactgtgatggtcaacctgaacatccataaccggaataccaataccaatcccaaaaggtcctcagattactacaaccgatccacctcaccttggaatctccaccgcaatgaggaccctgagagatatccctctgtgatctgggaggcaaagtgccgccacttgggctgcatcaacgctgatgggaacgtggactaccacatgaactctgtccccatccagcaagagatcctggtcctgcgcagggagcctccacactgccccaactccttccggctggagaagatactggtgtccgtgggctgcacctgtgtcaccccgattgtccaccatgtggcctaa

SEQ ID NO: 293 - protein, 155 aa, Homo sapiens
MTPGKTSLVSLLLLLSLEAIVKAGITIPRNPGCPNSEDKNFPRTVMVNLNIHNRNTNTNPKRSSDYYNRSTSPWNLHRNEDPERYPSVIWEAKCRHLGCINADGNVDYHMNSVPIQQEILVLRREPPHCPNSFRLEKILVSVGCTCVTPIVHHVA

SEQ ID NO: 294 - DNA, 387 bp, Homo sapiens
atgaaaccgtatgcccgcatggaggagtatgagaggaacatcgaggagatggtggcccagctgaggaacagctcagagctggcccagagaaagtgtgaggtcaacttgcagctgtggatgtccaacaagaggagcctgtctccctggggctacagcatcaaccacgaccccagccgtatccccgtggacctgccggaggcacggtgcctgtgtctgggctgtgtgaaccccttcaccatgcaggaggaccgcagcatggtgagcgtgccggtgttcagccaggttcctgtgcgccgccgcctctgcccgccaccgccccgcacagggccttgccgccagcgcgcagtcatggagaccatcgctgtgggctgcacctgcatcttctga

SEQ ID NO: 295 - protein, 128 aa, Homo sapiens
MKPYARMEEYERNIEEMVAQLRNSSELAQRKCEVNLQLWMSNKRSLSPWGYSINHDPSRIPVDLPEARCLCLGCVNPFTMQEDRSMVSVPVFSQVPVRRRLCPPPPRTGPCRQRAVMETIAVGCTCIF

SEQ ID NO: 296 - DNA, 594 bp, Homo sapiens
atgacgctcctccccggcctcctgtttctgacctggctgcacacatgcctggcccaccatgacccctccctcagggggcacccccacagtcacggtaccccacactgctactcggctgaggaactgcccctcggccaggcccccccacacctgctggctcgaggtgccaagtgggggcaggctttgcctgtagccctggtgtccagcctggaggcagcaagccacagggggaggcacgagaggccctcagctacgacccagtgcccggtgctgcggccggaggaggtgttggaggcagacacccaccagcgctccatctcaccctggagataccgtgtggacacggatgaggaccgctatccacagaagctggccttcgccgagtgcctgtgcagaggctgtatcgatgcacggacgggccgcgagacagctgcgctcaactccgtgcggctgctccagagcctgctggtgctgcgccgccggccctgctcccgcgacggctcggggctccccacacctggggcctttgccttccacaccgagttcatccacgtccccgtcggctgcacctgcgtgctgccccgttcagtgtga

SEQ ID NO: 297 - protein, 197 aa, Homo sapiens
MTLLPGLLFLTWLHTCLAHHDPSLRGHPHSHGTPHCYSAEELPLGQAPPHLLARGAKWGQALPVALVSSLEAASHRGRHERPSATTQCPVLRPEEVLEADTHQRSISPWRYRVDTDEDRYPQKLAFAECLCRGCIDARTGRETAALNSVRLLQSLLVLRRRPCSRDGSGLPTPGAFAFHTEFIHVPVGCTCVLPRSV

SEQ ID NO: 298 - DNA, 609 bp, Homo sapiens
atgctggtagccggcttcctgctggcgctgccgccgagctgggccgcgggcgccccgagggcgggcaggcgccccgcgcggccgcggggctgcgcggaccggccggaggagctactggagcagctgtacgggcgcctggcggccggcgtgctcagtgccttccaccacacgctgcagctggggccgcgtgagcaggcgcgcaacgcgagctgcccggcagggggcaggcccgccgaccgccgcttccggccgcccaccaacctgcgcagcgtgtcgccctgggcctacagaatctcctacgacccggcgaggtaccccaggtacctgcctgaagcctactgcctgtgccggggctgcctgaccgggctgttcggcgaggaggacgtgcgcttccgcagcgcccctgtctacatgcccaccgtcgtcctgcgccgcacccccgcctgcgccggcggccgttccgtctacaccgaggcctacgtcaccatccccgtgggctgcacctgcgtccccgagccggagaaggacgcagacagcatcaactccagcatcgacaaacagggcgccaagctcctgctgggccccaacgacgcgcccgctggcccctga

SEQ ID NO: 299 - protein, 202 aa, Homo sapiens
MLVAGFLLALPPSWAAGAPRAGRRPARPRGCADRPEELLEQLYGRLAAGVLSAFHHTLQLGPREQARNASCPAGGRPADRRFRPPTNLRSVSPWAYRISYDPARYPRYLPEAYCLCRGCLTGLFGEEDVRFRSAPVYMPTVVLRRTPACAGGRSVYTEAYVTIPVGCTCVPEPEKDADSINSSIDKQGAKLLLGPNDAPAGP

SEQ ID NO: 300 - DNA, 492 bp, Homo sapiens
atgacagtgaagaccctgcatggcccagccatggtcaagtacttgctgctgtcgatattggggcttgcctttctgagtgaggcggcagctcggaaaatccccaaagtaggacatacttttttccaaaagcctgagagttgcccgcctgtgccaggaggtagtatgaagcttgacattggcatcatcaatgaaaaccagcgcgtttccatgtcacgtaacatcgagagccgctccacctccccctggaattacactgtcacttgggaccccaaccggtacccctcggaagttgtacaggcccagtgtaggaacttgggctgcatcaatgctcaaggaaaggaagacatctccatgaattccgttcccatccagcaagagaccctggtcgtccggaggaagcaccaaggctgctctgtttctttccagttggagaaggtgctggtgactgttggctgcacctgcgtcacccctgtcatccaccatgtgcagtaa

SEQ ID NO: 301 - protein, 163 aa, Homo sapiens
MTVKTLHGPAMVKYLLLSILGLAFLSEAAARKIPKVGHTFFQKPESCPPVPGGSMKLDIGIINENQRVSMSRNIESRSTSPWNYTVTWDPNRYPSEVVQAQCRNLGCINAQGKEDISMNSVPIQQETLVVRRKHQGCSVSFQLEKVLVTVGCTCVTPVIHHVQ

SEQ ID NO: 302 - DNA, 570 bp, Homo sapiens
atgctggggagcagagctgtaatgctgctgttgctgctgccctggacagctcagggcagagctgtgcctgggggcagcagccctgcctggactcagtgccagcagctttcacagaagctctgcacactggcctggagtgcacatccactagtgggacacatggatctaagagaagagggagatgaagagactacaaatgatgttccccatatccagtgtggagatggctgtgacccccaaggactcagggacaacagtcagttctgcttgcaaaggatccaccagggtctgattttttatgagaagctgctaggatcggatattttcacaggggagccttctctgctccctgatagccctgtgggccagcttcatgcctccctactgggcctcagccaactcctgcagcctgagggtcaccactgggagactcagcagattccaagcctcagtcccagccagccatggcagcgtctccttctccgcttcaaaatccttcgcagcctccaggcctttgtggctgtagccgcccgggtctttgcccatggagcagcaaccctgagtccctaa

SEQ ID NO: 303 - protein, 189 aa, Homo sapiens
MLGSRAVMLLLLLPWTAQGRAVPGGSSPAWTQCQQLSQKLCTLAWSAHPLVGHMDLREEGDEETTNDVPHIQCGDGCDPQGLRDNSQFCLQRIHQGLIFYEKLLGSDIFTGEPSLLPDSPVGQLHASLLGLSQLLQPEGHHWETQQIPSLSPSQPWQRLLLRFKILRSLQAFVAVAARVFAHGAATLSP

SEQ ID NO: 304 - DNA, 570 bp, Homo sapiens
atggctgctgaaccagtagaagacaattgcatcaactttgtggcaatgaaatttattgacaatacgctttactttatagaaaacctggaatcagattactttggcaagcttgaatctaaattatcagtcataagaaatttgaatgaccaagttctcttcattgaccaaggaaatcggcctctatttgaagatatgactgattctgactgtagagataatgcaccccggaccatatttattataagtatgtataaagatagccagcctagaggtatggctgtaactatctctgtgaagtgtgagaaaatttcaactctctcctgtgagaacaaaattatttcctttaaggaaatgaatcctcctgataacatcaaggatacaaaaagtgacatcatattctttcagagaagtgtcccaggacatgataataagatgcaatttgaatcttcatcatacgaaggatactttctagcttgtgaaaaagagagagacctttttaaactcattttgaaaaaagaggatgaattgggggatagatctataatgttcactgttcaaaacgaagactag

SEQ ID NO: 305 - protein, 189 aa, Homo sapiens
MAAEPVEDNCINFVAMKFIDNTLYFIENLESDYFGKLESKLSVIRNLNDQVLFIDQGNRPLFEDMTDSDCRDNAPRTIFIISMYKDSQPRGMAVTISVKCEKISTLSCENKIISFKEMNPPDNIKDTKSDIIFFQRSVPGHDNKMQFESSSYEGYFLACEKERDLFKLILKKEDELGDRSIMFTVQNED

SEQ ID NO: 306 - DNA, 762 bp, Homo sapiens
atgtggccccctgggtcagcctcccagccaccgccctcacctgccgcggccacaggtctgcatccagcggctcgccctgtgtccctgcagtgccggctcagcatgtgtccagcgcgcagcctcctccttgtggctaccctggtcctcctggaccacctcagtttggccagaaacctccccgtggccactccagacccaggaatgttcccatgccttcaccactcccaaaacctgctgagggccgtcagcaacatgctccagaaggccagacaaactctagaattttacccttgcacttctgaagagattgatcatgaagatatcacaaaagataaaaccagcacagtggaggcctgtttaccattggaattaaccaagaatgagagttgcctaaattccagagagacctctttcataactaatgggagttgcctggcctccagaaagacctcttttatgatggccctgtgccttagtagtatttatgaagacttgaagatgtaccaggtggagttcaagaccatgaatgcaaagcttctgatggatcctaagaggcagatctttctagatcaaaacatgctggcagttattgatgagctgatgcaggccctgaatttcaacagtgagactgtgccacaaaaatcctcccttgaagaaccggatttttataaaactaaaatcaagctctgcatacttcttcatgctttcagaattcgggcagtgactattgatagagtgatgagctatctgaatgcttcctaa

SEQ ID NO: 307 - protein, 253 aa, Homo sapiens
MWPPGSASQPPPSPAAATGLHPAARPVSLQCRLSMCPARSLLLVATLVLLDHLSLARNLPVATPDPGMFPCLHHSQNLLRAVSNMLQKARQTLEFYPCTSEEIDHEDITKDKTSTVEACLPLELTKNESCLNSRETSFITNGSCLASRKTSFMMALCLSSIYEDLKMYQVEFKTMNAKLLMDPKRQIFLDQNMLAVIDELMQALNFNSETVPQKSSLEEPDFYKTKIKLCILLHAFRIRAVTIDRVMSYLNAS

SEQ ID NO: 308 - DNA, 987 bp, Homo sapiens
atgtgtcaccagcagttggtcatctcttggttttccctggtttttctggcatctcccctcgtggccatatgggaactgaagaaagatgtttatgtcgtagaattggattggtatccggatgcccctggagaaatggtggtcctcacctgtgacacccctgaagaagatggtatcacctggaccttggaccagagcagtgaggtcttaggctctggcaaaaccctgaccatccaagtcaaagagtttggagatgctggccagtacacctgtcacaaaggaggcgaggttctaagccattcgctcctgctgcttcacaaaaaggaagatggaatttggtccactgatattttaaaggaccagaaagaacccaaaaataagacctttctaagatgcgaggccaagaattattctggacgtttcacctgctggtggctgacgacaatcagtactgatttgacattcagtgtcaaaagcagcagaggctcttctgacccccaaggggtgacgtgcggagctgctacactctctgcagagagagtcagaggggacaacaaggagtatgagtactcagtggagtgccaggaggacagtgcctgcccagctgctgaggagagtctgcccattgaggtcatggtggatgccgttcacaagctcaagtatgaaaactacaccagcagcttcttcatcagggacatcatcaaacctgacccacccaagaacttgcagctgaagccattaaagaattctcggcaggtggaggtcagctgggagtaccctgacacctggagtactccacattcctacttctccctgacattctgcgttcaggtccagggcaagagcaagagagaaaagaaagatagagtcttcacggacaagacctcagccacggtcatctgccgcaaaaatgccagcattagcgtgcgggcccaggaccgctactatagctcatcttggagcgaatgggcatctgtgccctgcagttag

SEQ ID NO: 309 - protein, 328 aa, Homo sapiens
MCHQQLVISWFSLVFLASPLVAIWELKKDVYVVELDWYPDAPGEMVVLTCDTPEEDGITWTLDQSSEVLGSGKTLTIQVKEFGDAGQYTCHKGGEVLSHSLLLLHKKEDGIWSTDILKDQKEPKNKTFLRCEAKNYSGRFTCWWLTTISTDLTFSVKSSRGSSDPQGVTCGAATLSAERVRGDNKEYEYSVECQEDSACPAAEESLPIEVMVDAVHKLKYENYTSSFFIRDIIKPDPPKNLQLKPLKNSRQVEVSWEYPDTWSTPHSYFSLTFCVQVQGKSKREKKDRVFTDKTSATVICRKNASISVRAQDRYYSSSWSEWASVPCS

SEQ ID NO: 310 - protein, 532 aa, Homo sapiens
MCHQQLVISWFSLVFLASPLVAIWELKKDVYVVELDWYPDAPGEMVVLTCDTPEEDGITWTLDQSSEVLGSGKTLTIQVKEFGDAGQYTCHKGGEVLSHSLLLLHKKEDGIWSTDILKDQKEPKNKTFLRCEAKNYSGRFTCWWLTTISTDLTFSVKSSRGSSDPQGVTCGAATLSAERVRGDNKEYEYSVECQEDSACPAAEESLPIEVMVDAVHKLKYENYTSSFFIRDIIKPDPPKNLQLKPLKNSRQVEVSWEYPDTWSTPHSYFSLTFCVQVQGKSKREKKDRVFTDKTSATVICRKNASISVRAQDRYYSSSWSEWASVPCSGGGGGGSRNLPVATPDPGMFPCLHHSQNLLRAVSNMLQKARQTLEFYPCTSEEIDHEDITKDKTSTVEACLPLELTKNESCLNSRETSFITNGSCLASRKTSFMMALCLSSIYEDLKMYQVEFKTMNAKLLMDPKRQIFLDQNMLAVIDELMQALNFNSETVPQKSSLEEPDFYKTKIKLCILLHAFRIRAVTIDRVMSYLNAS

SEQ ID NO: 311 - protein, 505 aa, Homo sapiens
MCHQQLVISWFSLVFLASPLVAIWELKKDVYVVELDWYPDAPGEMVVLTCDTPEEDGITWTLDQSSEVLGSGKTLTIQVKEFGDAGQYTCHKGGEVLSHSLLLLHKKEDGIWSTDILKDQKEPKNKTFLRCEAKNYSGRFTCWWLTTISTDLTFSVKSSRGSSDPQGVTCGAATLSAERVRGDNKEYEYSVECQEDSACPAAEESLPIEVMVDAVHKLKYENYTSSFFIRDIIKPDPPKNLQLKPLKNSRQVEVSWEYPDTWSTPHSYFSLTFCVQVQGKSKREKKDRVFTDKTSATVICRKNASISVRAQDRYYSSSWSEWASVPCSGGGGGGSRAVPGGSSPAWTQCQQLSQKLCTLAWSAHPLVGHMDLREEGDEETTNDVPHIQCGDGCDPQGLRDNSQFCLQRIHQGLIFYEKLLGSDIFTGEPSLLPDSPVGQLHASLLGLSQLLQPEGHHWETQQIPSLSPSQPWQRLLLRFKILRSLQAFVAVAARVFAHGAATLSP

SEQ ID NO: 312 - protein, 601 aa, Homo sapiens
MCHQQLVISWFSLVFLASPLVAIWELKKDVYVVELDWYPDAPGEMVVLTCDTPEEDGITWTLDQSSEVLGSGKTLTIQVKEFGDAGQYTCHKGGEVLSHSLLLLHKKEDGIWSTDILKDQKEPKNKTFLRCEAKNYSGRFTCWWLTTISTDLTFSVKSSRGSSDPQGVTCGAATLSAERVRGDNKEYEYSVECQEDSACPAAEESLPIEVMVDAVHKLKYENYTSSFFIRDIIKPDPPKNLQLKPLKNSRQVEVSWEYPDTWSTPHSYFSLTFCVQVQGKSKREKKDRVFTDKTSATVICRKNASISVRAQDRYYSSSWSEWASVPCSGGGGGGSRNLPVATPDPGMFPCLHHSQNLLRAVSNMLQKARQTLEFYPCTSEEIDHEDITKDKTSTVEACLPLELTKNESCLNSRETSFITNGSCLASRKTSFMMALCLSSIYEDLKMYQVEFKTMNAKLLMDPKRQIFLDQNMLAVIDELMQALNFNSETVPQKSSLEEPDFYKTKIKLCILLHAFRIRAVTIDRVMSYLNASTTTPAPRPPTPAPTIASQPLSLRPEACRPAAGGAVHTRGLDFACDIYIWAPLAGTCGVLLLSLVITLYC

SEQ ID NO: 313 - protein, 786 aa, Homo sapiens
MCHQQLVISWFSLVFLASPLVAIWELKKDVYVVELDWYPDAPGEMVVLTCDTPEEDGITWTLDQSSEVLGSGKTLTIQVKEFGDAGQYTCHKGGEVLSHSLLLLHKKEDGIWSTDILKDQKEPKNKTFLRCEAKNYSGRFTCWWLTTISTDLTFSVKSSRGSSDPQGVTCGAATLSAERVRGDNKEYEYSVECQEDSACPAAEESLPIEVMVDAVHKLKYENYTSSFFIRDIIKPDPPKNLQLKPLKNSRQVEVSWEYPDTWSTPHSYFSLTFCVQVQGKSKREKKDRVFTDKTSATVICRKNASISVRAQDRYYSSSWSEWASVPCSGGGGGGSRNLPVATPDPGMFPCLHHSQNLLRAVSNMLQKARQTLEFYPCTSEEIDHEDITKDKTSTVEACLPLELTKNESCLNSRETSFITNGSCLASRKTSFMMALCLSSIYEDLKMYQVEFKTMNAKLLMDPKRQIFLDQNMLAVIDELMQALNFNSETVPQKSSLEEPDFYKTKIKLCILLHAFRIRAVTIDRVMSYLNASESKYGPPCPPCPAPEFLGGPSVFLFPPKPKDTLMISRTPEVTCVVVDVSQEDPEVQFNWYVDGVEVHNAKTKPREEQFNSTYRVVSVLTVLHQDWLNGKEYKCKVSNKGLPSSIEKTISKAKGQPREPQVYTLPPSQEEMTKNQVSLTCLVKGFYPSDIAVEWESNGQPENNYKTTPPVLDSDGSFFLYSRLTVDKSRWQEGNVFSCSVMHEALHNHYTQKSLSLSLGKMIYIWAPLAGTCGVLLLSLVITLYC

SEQ ID NO: 314 - protein, 219 aa, Homo sapiens
HYFQQKVFVLLAALRPQWCSREIPDPANSTCAKKYPIAEEKTQLPLDRLLIDWPTPEDPEPLVISEVLHQVTPVFRHPPCSNWPQREKGIQGHQASEKDMMHSASSPPPPRALQAESRQLVDLYKVLESRGSDPKPENPACPWTVLPAGDLPTHDGYLPSNIDDLPSHEAPLADSLEELEPQHISLSVFPSSSLHPLTFSCGDKLTLDQLKMRCDSLML

SEQ ID NO: 315 - protein, 191 aa, Homo sapiens
YRVDLVLFYRHLTRRDETLTDGKTYDAFVSYLKECRPENGEEHTFAVEILPRVLEKHFGYKLCIFERDVVPGGAVVDEIHSLIEKSRRLIIVLSKSYMSNEVRYELESGLHEALVERKIKIILIEFTPVTDFTFLPQSLKLLKSHRVLKWKADKSLSYNSRFWKNLLYLMPAKTVKPGRDEPEVLPVLSES

SEQ ID NO: 316 - protein, 253 aa, Homo sapiens
NRSFRTGIKRRILLLIPKWLYEDIPNMKNSNVVKMLQENSELMNNNSSEQVLYVDPMITEIKEIFIPEHKPTDYKKENTGPLETRDYPQNSLFDNTTVVYIPDLNTGYKPQISNFLPEGSHLSNNNEITSLTLKPPVDSLDSGNNPRLQKHPNFAFSVSSVNSLSNTIFLGELSLILNQGECSSPDIQNSVEEETTMLLENDSPSETIPEQTLLPDEFVSCLGIVNEELPSINTYFPQNILESHFNRISLLEK

SEQ ID NO: 317 - protein, 277 aa, Homo sapiens
NKRDLIKKHIWPNVPDPSKSHIAQWSPHTPPRHNFNSKDQMYSDGNFTDVSVVEIEANDKKPFPEDLKSLDLFKKEKINTEGHSSGIGGSSCMSSSRPSISSSDENESSQNTSSTVQYSTVVHSGYRHQVPSVQVFSRSESTQPLLDSEERPEDLQLVDHVDGGDGILPRQQYFKQNCSQHESSPDISHFERSKQVSSVNEEDFVRLKQQISDHISQSCGSGQMKMFQEVSAADAFGPGTEGQVERFETVGMEAATDEGMPKSYLPQTVRQGGYMPQ

SEQ ID NO: 318 - protein, 39 aa, Homo sapiens
KSRQTPPLASVEMEAMEALPVTWGTSSRDEDLENCSHHL

SEQ ID NO: 319 - protein, 662 aa, Homo sapiens
MEPLVTWVVPLLFLFLLSRQGAACRTSECCFQDPPYPDADSGSASGPRDLRCYRISSDRYECSWQYEGPTAGVSHFLRCCLSSGRCCYFAAGSATRLQFSDQAGVSVLYTVTLWVESWARNQTEKSPEVTLQLYNSVKYEPPLGDIKVSKLAGQLRMEWETPDNQVGAEVQFRHRTPSSPWKLGDCGPQDDDTESCLCPLEMNVAQEFQLRRRQLGSQGSSWSKWSSPVCVPPENPPQPQVRFSVEQLGQDGRRRLTLKEQPTQLELPEGCQGLAPGTEVTYRLQLHMLSCPCKAKATRTLHLGKMPYLSGAAYNVAVISSNQFGPGLNQTWHIPADTHTEPVALNISVGTNGTTMYWPARAQSMTYCIEWQPVGQDGGLATCSLTAPQDPDPAGMATYSWSRESGAMGQEKCYYITIFASAHPEKLTLWSTVLSTYHFGGNASAAGTPHHVSVKNHSLDSVSVDWAPSLLSTCPGVLKEYVVRCRDEDSKQVSEHPVQPTETQVTLSGLRAGVAYTVQVRADTAWLRGVWSQPQRFSIEVQVSDWLIFFASLGSFLSILLVGVLGYLGLNRAARHLCPPLPTPCASSAIEFPGGKETWQWINPVDFQEEASLQEALVVEMSWDKGERTEPLEKTELPEGAPELALDTELSLEDGDRCKAKM

SEQ ID NO: 320 - protein, 373 aa, Artificial Sequence
  Synthesized
KRGRKKLLYIFKQPFMRPVQTTQEEDGCSCRFPEEEEGGCELRVKFSRSADAPAYQQGQNQLYNELNLGRREEYDVLDKRRGRDPEMGGKPRRKNPQEGLYNELQKDKMAEAYSEIGMKGERRRGKGHDGLYQGLSTATKDTYDALHMQALPPRHYFQQKVFVLLAALRPQWCSREIPDPANSTCAKKYPIAEEKTQLPLDRLLIDWPTPEDPEPLVISEVLHQVTPVFRHPPCSNWPQREKGIQGHQASEKDMMHSASSPPPPRALQAESRQLVDLYKVLESRGSDPKPENPACPWTVLPAGDLPTHDGYLPSNIDDLPSHEAPLADSLEELEPQHISLSVFPSSSLHPLTFSCGDKLTLDQLKMRCDSLML

SEQ ID NO: 321 - protein, 373 aa, Artificial Sequence
  Synthesized
KRGRKKLLYIFKQPFMRPVQTTQEEDGCSCRFPEEEEGGCELHYFQQKVFVLLAALRPQWCSREIPDPANSTCAKKYPIAEEKTQLPLDRLLIDWPTPEDPEPLVISEVLHQVTPVFRHPPCSNWPQREKGIQGHQASEKDMMHSASSPPPPRALQAESRQLVDLYKVLESRGSDPKPENPACPWTVLPAGDLPTHDGYLPSNIDDLPSHEAPLADSLEELEPQHISLSVFPSSSLHPLTFSCGDKLTLDQLKMRCDSLMLRVKFSRSADAPAYQQGQNQLYNELNLGRREEYDVLDKRRGRDPEMGGKPRRKNPQEGLYNELQKDKMAEAYSEIGMKGERRRGKGHDGLYQGLSTATKDTYDALHMQALPPR

SEQ ID NO: 322 - protein, 373 aa, Artificial Sequence
  Synthesized
HYFQQKVFVLLAALRPQWCSREIPDPANSTCAKKYPIAEEKTQLPLDRLLIDWPTPEDPEPLVISEVLHQVTPVFRHPPCSNWPQREKGIQGHQASEKDMMHSASSPPPPRALQAESRQLVDLYKVLESRGSDPKPENPACPWTVLPAGDLPTHDGYLPSNIDDLPSHEAPLADSLEELEPQHISLSVFPSSSLHPLTFSCGDKLTLDQLKMRCDSLMLKRGRKKLLYIFKQPFMRPVQTTQEEDGCSCRFPEEEEGGCELRVKFSRSADAPAYQQGQNQLYNELNLGRREEYDVLDKRRGRDPEMGGKPRRKNPQEGLYNELQKDKMAEAYSEIGMKGERRRGKGHDGLYQGLSTATKDTYDALHMQALPPR

SEQ ID NO: 323 - DNA, 1117 bp, Artificial Sequence
  Synthesized
aatgctttgtcctggagagctatcttaagggacaaaatcgttttcccagcgtcatctgtgacacatcctgacagtagagagctgcttccaagaagcaatttgaagtgccattatcaggcagggacgggggctctaggggatttcggggtcagcagatatgaaatgaatgatttcatagggctgtcacagagctgtggtgggaatttcccatgagaccccgcccctggctgagtcaccgcactcctgtgtttgacctgaagtcctctcgagctgcagaagcctgaagaccaaggagtggaaagttctccggcagccctgagatctcaaggtctgtccatctgggggagtgggtgggggcactgagaaggggtgagattggaacttttgctccctttgcccatttctagactttttctcctaatatgtaataacttctcttcaatagccctttaaataaacatcaataacttagcctgaagagtttttcactccttagttttgttaccatacaaacttcacatctcaaaacatgtctctgtttaagaaaatgtgttagtgagttgaacagggaggtctttccacatgttagtagttaggtgttcagctaaagggggaagagtgattatgtgatagcttcttcttgaactgaattgtctgatgcccctgacagattctctttgtaaggagtttatttcaggggcaataagtaattggcattattgctggttggtactgcaaagtacctatgaaagtccccaaaagttcttgctattgttatttctgcattttggcagaacatgatggaaaatgcaccctcaaactttggcaaaccggcacaaagctgtgtgtttaatcacgcctgccttgtcctagtggtttctatgaatctgctacttttccgtaatattgcatcattaattgttcctgaaaaaccctgagttatcctcttatagaattgtataagtaatgattgcaatatagataattttgaaaggagaaaccacctttccttggaaatgtttatcttttgcagagtgacatttgtgagaccagctaatttgattaaaattctcttggaatcagctttgctagtatcatacctgtgccagatttcatc

SEQ ID NO: 324 - DNA, 590 bp, Artificial Sequence
  Synthesized
agtgaggcggtacccacagagccgcgtggcactcctcaacctgctagagcagccggcctcctgcaggatggcttaaggaccacctggtccttggggtctgggttctccgggtcctgctgttccctgcagccttccttctacccccagagcagcttgggggcatctttagagaaagcggcagtgtcgcacctgccccagcagccacaaaacagaggaaattctgagcacctccgggcgtgagtcaccataccacattcaggaattgccacctctgcccacagaatcacccactcttttctgtttgggaccaaaatagatacctccttcagaagccgctgctttctgtactctcagcaataaaaaaacaaaggctaggataggtgtgtgcctctgaggcgtgagggggggcgcgttttctcccctgggaaggttttcagagagaagttgttgctacagcagtacaggcagctgatgggttgagggtacaggaggaagagggatggcctcggcggccaagcttagacactagagggtatataatggaagctcgacttccagcttggcaatccggtactgttggtaaagccacc

SEQ ID NO: 325 - DNA, 687 bp, Artificial Sequence
  Synthesized
tgagagaggatgatgtattctaaattgaagttttgattcacaagaagattaaaagccattcagaaacctaattcacccactgaaaggaaaaaaaaaaaagagagatgagcagtttgtctccggaaattgtcttaggtcggaagtctgtggtccctgttcacatgtacccaaaagcatcctgctgctgcagctgtctgataagcacagagtaccccaccttctctgcacactttgcatctagctcatattacctcatctttacttcctttctgacgtctcaccctggattctacatataaggtcacacaggaaggaaagctgcattgagttttggtgtcctgaaagacttttgccaaccttgtccccgcactaatttctctaagcctcggctatactattttctcagctacacgatgaaatgtgaatgataatttctgccctaaaaatatcacttaattttttaacatatcatttatgaaagaagacacataaaatgtctccctaaaatggaaagttacatattattgccatctgtgttttataaagaggttgaaaggggtggtacctgagctcgctagcctcgaggatatcaagatctggcctcggcggccaagcttagacactagagggtatataatggaagctcgacttccagcttggcaatccggtactgttggtaaagccacc

SEQ ID NO: 326 - DNA, 688 bp, Homo sapiens
tttctactgggcagtgctgatctagagcaatttgaaacttgtggtagatattttactaaccaactctgatgaaggacttcctcaccaaattgttcttttaaccgcattctttccttgctttctggtcatttgcaagaaaaattttaaaaggctgcccctttgtaaaggtttgagaggccctagaatttcgtttttcacttgttcccaaccacaagcaaatgatcaatgtgctttgtgaatgaagagtcaacattttaccagggcgaagtggggaggtacaaaaaaatttccagtccttgaatggtgtgaagtaaaagtgccttcaaagaatcccaccagaatggcacaggtgggcataatgggtctgtctcatcgtcaaaggacccaaggagtctaaaggaaactctaactacaacacccaaatgccacaaaaccttagttattaatacaaactatcatccctgcctatctgtcaccatctcatcttaaaaaacttgtgaaaatacgtaatcctcaggagacttcaattaggtataaataccagcagccagaggaggtgcagcacattgttctgatcatctgaagatcagctattagaagagaaagatcagttaagtcctttggacctgatcagcttgatacaagaactactgatttcaacttctttggcttaattctctcggaaacg

SEQ ID NO: 327 - DNA, 57 bp, Homo sapiens
gccacgaacttctctctgttaaagcaagcaggagacgtggaagaaaaccccggtcct

SEQ ID NO: 328 - protein, 166 aa, Homo sapiens
MKYTSYILAFQLCIVLGSLGCYCQDPYVKEAENLKKYFNAGHSDVADNGTLFLGILKNWKEESDRKIMQSQIVSFYFKLFKNFKDDQSIQKSVETIKEDMNVKFFNSNKKKRDDFEKLTNYSVTDLNVQRKAIHELIQVMAELSPAAKTGKRKRSQMLFRGRRASQ

SEQ ID NO: 329 - protein, 326 aa, Homo sapiens
EETRELQSLAAAVVPSAQTLKITDFSFSDFELSDLETALCTIRMFTDLNLVQNFQMKHEVLCRWILSVKKNYRKNVAYHNWRHAFNTAQCMFAALKAGKIQNKLTDLEILALLIAALSHDLDHRGVNNSYIQRSEHPLAQLYCHSIMEHHHFDQCLMILNSPGNQILSGLSIEEYKTTLKIIKQAILATDLALYIKRRGEFFELIRKNQFNLEDPHQKELFLAMLMTACDLSAITKPWPIQQRIAELVATEFFDQGDRERKELNIEPTDLMNREKKNKIPSMQVGFIDAICLQLYEALTHVSEDCFPLLDGCRKNRQKWQALAEQQ

SEQ ID NO: 330 - DNA, 76 bp, Homo sapiens
gtgactacgtgctgcctaggtgactacgtgctgcctaggtgactacgtgctgcctaggtgactacgtgctgcctag

SEQ ID NO: 331 - DNA, 72 bp, Homo sapiens
tgtcacgtcctgcacgactctagttgtcacgtcctgcacgactctagttgtcacgtcctgcacgacgctagc

SEQ ID NO: 332 - DNA, 277 bp, Homo sapiens
tcgaggtcgacggtatcgataagcttgatatcgaattaggaggaaaaactgtttcatacagaaggcgtcaattaggaggaaaaactgtttcatacagaaggcgtcaattaggaggaaaaactgtttcatacagaaggcgtcaattggtcccatcgaattaggaggaaaaactgtttcatacagaaggcgtcaattaggaggaaaaactgtttcatacagaaggcgtcaattaggaggaaaaactgtttcatacagaaggcgtcaattggtcccggga

SEQ ID NO: 333 - DNA, 90 bp, Homo sapiens
acgccttctgtatgaaacagtttttcctccacgccttctgtatgaaacagtttttcctccacgccttctgtatgaaacagtttttcctcc

SEQ ID NO: 334 - DNA, 99 bp, Homo sapiens
caaggtaaacaagagtaaacaagtcaaggtaaacaagagtaaacaagtccaaggtaaacaagagtaaacaagtccaaggtaaacaagagtaaacaagtc

SEQ ID NO: 335 - DNA, 54 bp, Homo sapiens
cagtacgtgcagtacgtgcagtacgtgcagtacgtgcagtacgtgcagtacgtg

SEQ ID NO: 336 - DNA, 92 bp, Homo sapiens
ggatctgcgatcgctgaattctggggactttccactggggactttccactggggactttccactggggactttccactggggactttccact

SEQ ID NO: 337 - DNA, 52 bp, Homo sapiens
gggaatttccggggactttccgggaatttccggggactttccgggaatttcc

SEQ ID NO: 338 - DNA, 84 bp, Homo sapiens
tacgctcgcttcgacagcggagactctagagggtatataatgggagctcgaattccagcttggcattccggtactgttggtaaa

SEQ ID NO: 339 - DNA, 108 bp, Homo sapiens
ctcgaggatatcaagatctggcctcggcggccaagcttagacactagagggtatataatggaagctcgacttccagcttggcaatccggtactgttggtaaagccacc

SEQ ID NO: 340 - DNA, 206 bp, Homo sapiens
tcgagatccggccccgcccagcgtcttgtcattggcgaattcgaacacgcagatgcagtcggggcggcgcggtccgaggtccacttcgcatattaaggtgacgcgtgtggcctcgaacaccgagcgaccctgcagcgacccgcttaacagcgtcaacagcgtgccgcagatctaagtaagcttggcattccggtactgttggtaaa

SEQ ID NO: 341 - DNA, 113 bp, Homo sapiens
cattttgacacccccataatatttttccagaattaacagtataaattgcatctcttgttcaagagttccctatcactctctttaatcactactcacagtaacctcaactcctg

SEQ ID NO: 342 - DNA, 115 bp, Homo sapiens
ggggatctggcgcggtcccaggtccacttcgcatattaaggtgacgcgtgtggcctcgaacaccgagcgaccctgcagcgacccgcaagcttggcattccggtactgttggtaaa

SEQ ID NO: 343 - DNA, 322 bp, Homo sapiens
ctttcaggtaggcctgtgcctttttcagcgggctgcagttctcctgcttggcttgagtcattcgcatttcctgagagctgggtagagggggagttgtggaggagcccattctgaaactgatctgatattgcaaacccatacacggaaaggaagaactgcccatacgtattcgagtcttccaatctgactccgagcccgcatccccctcaatcgtctcttttccccactccccagatcacggtgctgcttggtccccctcagagccatagagaagcagggggtgtggccatggaggggaaacctctgtcaccagagactttac

SEQ ID NO: 344 - DNA, 84 bp, Homo sapiens; identical to SEQ ID NO: 338

SEQ ID NO: 345 - DNA, 192 bp, Homo sapiens
cctgcagcagtggatattcccagaaaactttttggatgcagttggggatttcctctttactggatgtggacaatatcctcctattattcacaggaagcaatccctcctataaaagggcctcagcagaagtagtgttcagctgttcttggctgacttcacatcaaagcttctatactgacctgagacagagcc

SEQ ID NO: 346 - DNA, 95 bp, Homo sapiens
agatctggcctcggcggccaagcttagacactagagggtatataatggaagctcgacttccagcttggcaatccggtactgttggtaaagccacc

SEQ ID NO: 347 - protein, 233 aa, Homo sapiens
MSTESMIRDVELAEEALPKKTGGPQGSRRCLFLSLFSFLIVAGATTLFCLLHFGVIGPQREEFPRDLSLISPLAQAVRSSSRTPSDKPVAHVVANPQAEGQLQWLNRRANALLANGVELRDNQLVVPSEGLYLIYSQVLFKGQGCPSTHVLLTHTISRIAVSYQTKVNLLSAIKSPCQRETPEGAEAKPWYEPIYLGGVFQLEKGDRLSAEINRPDYLDFAESGQVYFGIIAL

SEQ ID NO: 348 - protein, 244 aa, Homo sapiens
MGALGLEGRGGRLQGRGSLLLAVAGATSLVTLLLAVPITVLAVLALVPQDQGGLVTETADPGAQAQQGLGFQKLPEEEPETDLSPGLPAAHLIGAPLKGQGLGWETTKEQAFLTSGTQFSDAEGLALPQDGLYYLYCLVGYRGRAPPGGGDPQGRSVTLRSSLYRAGGAYGPGTPELLLEGAETVTPVLDPARRQGYGPLWYTSVGFGGLVQLRRGERVYVNISHPDMVDFARGKTFFGAVMVG

SEQ ID NO: 349 - protein, 183 aa, Homo sapiens
MERVQPLEENVGNAARPRFERNKLLLVASVIQGLGLLLCFTYICLHFSALQVSHRYPRIQSIKVQFTEYKKEKGFILTSQKEDEIMKVQNNSVIINCDGFYLISLKGYFSQEVNISLHYQKDEEPLFQLKKVRSVNSLMVASLTYKDKVYLNVTTDNTSLDDFHVNGGELILIHQNPGEFCVL

SEQ ID NO: 350 - protein, 261 aa, Homo sapiens
MIETYNQTSPRSAATGLPISMKIFMYLLTVFLITQMIGSALFAVYLHRRLDKIEDERNLHEDFVFMKTIQRCNTGERSLSLLNCEEIKSQFEGFVKDIMLNKEETKKENSFEMQKGDQNPQIAAHVISEASSKTTSVLQWAEKGYYTMSNNLVTLENGKQLTVKRQGLYYIYAQVTFCSNREASSQAPFIASLCLKSPGRFERILLRAANTHSSAKPCGQQSIHLGGVFELQPGASVFVNVTDPSQVSHGTGFTSFGLLKL

SEQ ID NO: 351 - protein, 281 aa, Homo sapiens
MQQPFNYPYPQIYWVDSSASSPWAPPGTVLPCPTSVPRRPGQRRPPPPPPPPPLPPPPPPPPLPPLPLPPLKKRGNHSTGLCLLVMFFMVLVALVGLGLGMFQLFHLQKELAELRESTSQMHTASSLEKQIGHPSPPPEKKELRKVAHLTGKSNSRSMPLEWEDTYGIVLLSGVKYKKGGLVINETGLYFVYSKVYFRGQSCNNLPLSHKVYMRNSKYPQDLVMMEGKMMSYCTTGQMWARSSYLGAVFNLTSADHLYVNVSELSLVNFEESQTFFGLYKL

SEQ ID NO: 352 - protein, 193 aa, Homo sapiens
MPEEGSGCSVRRRPYGCVLRAALVPLVAGLVICLVVCIQRFAQAQQQLPLESLGWDVAELQLNHTGPQQDPRLYWQGGPALGRSFLHGPELDKGQLRIHRDGIYMVHIQVTLAICSSTTASRHHPTTLAVGICSPASRSISLLRLSFHQGCTIASQRLTPLARGDTLCTNLTGTLLPSRNTDETFFGVQWVRP

SEQ ID NO: 353 - protein, 234 aa, Homo sapiens
MDPGLQQALNGMAPPGDTAMHVPAGSVASHLGTTSRSYFYLTTATLALCLVFTVATIMVLVVQRTDSIPNSPDNVPLKGGNCSEDLLCILKRAPFKKSWAYLQVAKHLNKTKLSWNKDGILHGVRYQDGNLVIQFPGLYFIICQLQFLVQCPNNSVDLKLELLINKHIKKQALVTVCESGMQTKHVYQNLSQFLLDYLQVNTTISVNVDTFQYIDTSTFPLENVLSIFLYSNSD

SEQ ID NO: 354 - protein, 254 aa, Homo sapiens
MEYASDASLDPEAPWPPAPRARACRVLPWALVAGLLLLLLLAAACAVFLACPWAVSGARASPGSAASPRLREGPELSPDDPAGLLDLRQGMFAQLVAQNVLLIDGPLSWYSDPGLAGVSLTGGLSYKEDTKELVVAKAGVYYVFFQLELRRVVAGEGSGSVSLALHLQPLRSAAGAAALALTVDLPPASSEARNSAFGFQGRLLHLSAGQRLGVHLHTEARARHAWQLTQGATVLGLFRVTPEIPAGLPSPRSE

SEQ ID NO: 355 - protein, 281 aa, Homo sapiens [sequence omitted]

SEQ ID NO: 356 - protein, 317 aa, Homo sapiens
MRRASRDYTKYLRGSEEMGGGPGAPHEGPLHAPPPPAPHQPPAASRSMFVALLGLGLGQVVCSVALFFYFRAQMDPNRISEDGTHCIYRILRLHENADFQDTTLESQDTKLIPDSCRRIKQAFQGAVQKELQHIVGSQHIRAEKAMVDGSWLDLAKRSKLEAQPFAHLTINATDIPSGSHKVSLSSWYHDRGWAKISNMTFSNGKLIVNQDGFYYLYANICFRHHETSGDLATEYLQLMVYVTKTSIKIPSSHTLMKGGSTKYWSGNSEFHFYSINVGGFFKLRSGEEISIEVSNPSLLDPDQDATYFGAFKVRDID

SEQ ID NO: 357 - protein, 249 aa, Homo sapiens
MAARRSQRRRGRRGEPGTALLVPLALGLGLALACLGLLLAVVSLGSRASLSAQEPAQEELVAEEDQDPSELNPQTEESQDPAPFLNRLVRPRRSAPKGRKTRARRAIAAHYEVHPRPGQDGAQAGVDGTVSGWEEARINSSSPLRYNRQIGEFIVTRAGLYYLYCQVHFDEGKAVYLKLDLLVDGVLALRCLEEFSATAASSLGPQLRLCQVSGLLALRPGSSLRIRTLPWAHLKAAPFLTYFGLFQVH

SEQ ID NO: 358 - protein, 250 aa, Homo sapiens [sequence omitted]

SEQ ID NO: 359 - protein, 240 aa, Homo sapiens
MEESVVRPSVFVVDGQTDIPFTRLGRSHRRQSCSVARVGLGLLLLLMGAGLAVQGWFLLQLHWRLGEMVTRLPDGPAGSWEQLIQERRSHEVNPAAHLTGANSSLTGSGGPLLWETQLGLAFLRGLSYHDGALVVTKAGYYYIYSKVQLGGVGCPLGLASTITHGLYKRTPRYPEELELLVSQQSPCGRATSSSRVWWDSSFLGGVVHLEAGEKVVVRVLDERLVRLRDGTRSYFGAFMV

SEQ ID NO: 360 - protein, 241 aa, Homo sapiens
MSMLFYTLITAFLIGIQAEPHSESNVPAGHTIPQAHWTKLQHSLDTALRRARSAPAAAIAARVAGQTRNITVDPRLFKKRRLRSPRVLFSTQPPREAADTQDLDFEVGGAAPFNRTHRSKRSSSHPIFHRGEFSVCDSVSVWVGDKTTATDIKGKEVMVLGEVNINNSVFKQYFFETKCRDPNPVDSGCRGIDSKHWNSYCTTTHTFVKALTMDGKQAAWRFIRIDTACVCVLSRKAVRRA

SEQ ID NO: 361 - protein, 199 aa, Homo sapiens
MTLHPSPITCEFLFSTALISPKMCLSHLENMPLSHSRTQGAQRSSWKLWLFCSIVMLLFLCSFSWLIFIFLQLETAKEPCMAKFGPLPSKWQMASSEPPCVNKVSDWKLEILQNGLYLIYGQVAPNANYNDVAPFEVRLYKNKDMIQTLTNKSKIQNVGGTYELHVGDTIDLIFNSEHQVLKNNTYWGIILLANPQFIS

SEQ ID NO: 362 - protein, 251 aa, Homo sapiens
MAEDLGLSFGETASVEMLPEHGSCRPKARSSSARWALTCCLVLLPFLAGLTTYLLVSQLRAQGEACVQFQALKGQEFAPSHQQVYAPLRADGDKPRAHLTVVRQTPTQHFKNQFPALHWEHELGLAFTKNRMNYTNKFLLIPESGDYFIYSQVTFRGMTSECSEIRQAGRPNKPDSITVVITKVTDSYPEPTQLLMGTKSVCEVGSNWFQPIYLGAMFSLQEGDKLMVNVSDISLVDYTKEDKTFFGAFLL

SEQ ID NO: 363 - protein, 391 aa, Homo sapiens
MGYPEVERRELLPAAAPRERGSQGCGCGGAPARAGEGNSCLLFLGFFGLSLALHLLTLCCYLELRSELRRERGAESRLGGSGTPGTSGTLSSLGGLDPDSPITSHLGQPSPKQQPLEPGEAALHSDSQDGHQMALLNFFFPDEKPYSEEESRRVRRNKRSKSNEGADGPVKNKKKGKKAGPPGPNGPPGPPGPPGPQGPPGIPGIPGIPGTTVMGPPGPPGPPGPQGPPGLQGPSGAADKAGTRENQPAVVHLQGQGSAIQVKNDLSGGVLNDWSRITMNPKVFKLHPRSGELEVLVDGTYFIYSQVEVYYINFTDFASYEVVVDEKPFLQCTRSIETGKTNYNTCYTAGVCLLKARQKIAVKMVHADISINMSKHTTFFGAIRLGEAPAS

SEQ ID NO: 364 - protein, 107 aa, Homo sapiens
MARAALSAAPSNPRLLRVALLLLLLVAAGRRAAGASVATELRCQCLQTLQGIHPKNIQSVNVKSPGPHCAQTEVIATLKNGRKACLNPASPIVKKIIEKMLNSDKSN

SEQ ID NO: 365 - protein, 107 aa, Homo sapiens
MARATLSAAPSNPRLLRVALLLLLLVAASRRAAGAPLATELRCQCLQTLQGIHLKNIQSVKVKSPGPHCAQTEVIATLKNGQKACLNPASPMVKKIIEKMLKNGKSN

SEQ ID NO: 366 - protein, 107 aa, Homo sapiens
MAHATLSAAPSNPRLLRVALLLLLLVAASRRAAGASVVTELRCQCLQTLQGIHLKNIQSVNVRSPGPHCAQTEVIATLKNGKKACLNPASPMVQKIIEKILNKGSTN

SEQ ID NO: 367 - protein, 101 aa, Homo sapiens
MSSAAGFCASRPGLLFLGLLLLPLVVAFASAEAEEDGDLQCLCVKTTSQVRPRHITSLEVIKAGPHCPTAQLIATLKNGRKICLDLQAPLYKKIIKKLLES

SEQ ID NO: 368 - protein, 114 aa, Homo sapiens
MSLLSSRAARVPGPSSSLCALLVLLLLLTQPGPIASAGPAAAVLRELRCVCLQTTQGVHPKMISNLQVFAIGPQCSKVEVVASLKNGKEICLDPEAPFLKKVIQKILDGGNKEN

SEQ ID NO: 369 - protein, 114 aa, Homo sapiens; identical to SEQ ID NO: 368

SEQ ID NO: 370 - protein, 128 aa, Homo sapiens
MSLRLDTTPSCNSARPLHALQVLLLLSLLLTALASSTKGQTKRNLAKGKEESLDSDLYAELRCMCIKTTSGIHPKNIQSLEVIGKGTHCNQVEVIATLKDGRKICLDPDAPRIKKIVQKKLAGDESAD

SEQ ID NO: 371 - protein, 99 aa, Homo sapiens
MTSKLAVALLAAFLISAALCEGAVLPRSAKELRCQCIKTYSKPFHPKFIKELRVIESGPHCANTEIIVKLSDGRELCLDPKENWVQRVVEKFLKRAENS

SEQ ID NO: 372 - protein, 125 aa, Homo sapiens
MKKSGVLFLLGIILLVLIGVQGTPVVRKGRCSCISTNQGTIHLQSLKDLKQFAPSPSCEKIEIIATLKNGVQTCLNPDSADVKELIKKWEKQVSQKKKQKNGKKHQKKKVLKVRKSQRSRQKKTT

SEQ ID NO: 373 - protein, 98 aa, Homo sapiens
MNQTAILICCLIFLTLSGIQGVPLSRTVRCTCISISNQPVNPRSLEKLEIIPASQFCPRVEIIATMKKKGEKRCLNPESKAIKNLLKAVSKERSKRSP

SEQ ID NO: 374 - protein, 94 aa, Homo sapiens
MSVKGMAIALAVILCATVVQGFPMFKRGRCLCIGPGVKAVKVADIEKASIMYPSNNCDKIEVIITLKENKGQRCLNPKSKQARLIIKKVERKNF

SEQ ID NO: 375 - protein, 93 aa, Homo sapiens
MNAKVVVVLVLVLTALCLSDGKPVSLSYRCPCRFFESHVARANVKHLKILNTPNCALQIVARLKNNNRQVCIDPKLKWIQEYLEKALNKRFKM

SEQ ID NO: 376 - protein, 109 aa, Homo sapiens
MKFISTSLLLMLLVSSLSPVQGVLEVYYTSLRCRCVQESSVFIPRRFIDRIQILPRGNGCPRKEIIVWKKNKSIVCVDPQAEWIQRMMEVLRKRSSSTLPVPVFKRKIP

SEQ ID NO: 377 - protein, 111 aa, Homo sapiens
MSLLPRRAPPVSMRLLAAALLLLLLALYTARVDGSKCKCSRKGPKIRYSDVKKLEMKPKYPHCEEKMVIITTKSVSRYRGQEHCLHPKLQSTKRFIKWYNAWNEKRRVYEE

SEQ ID NO: 378 - protein, 96 aa, Homo sapiens
MQIITTALVCLLLAGMWPEDVDSKSMQVPFSRCCFSFAEQEIPLRAILCYRNTSSICSNEGLIFKLKRGKEACALDTVGWVQRHRKMLRHCPSKRK

SEQ ID NO: 379 - protein, 99 aa, Homo sapiens
MKVSAALLCLLLIAATFIPQGLAQPDAINAPVTCCYNFTNRKISVQRLASYRRITSSKCPKEAVIFKTIVAKEICADPKQKWVQDSMDHLDKQTQTPKT

SEQ ID NO: 380 - protein, 92 aa, Homo sapiens
MQVSTAALAVLLCTMALCNQFSASLAADTPTACCFSYTSRQIPQNFIADYFETSSQCSKPGVIFLTKRSRQVCADPSEEWVQKYVSDLELSA

SEQ ID NO: 381 - protein, 93 aa, Homo sapiens
MQVSTAALAVLLCTMALCNQVLSAPLAADTPTACCFSYTSRQIPQNFIADYFETSSQCSKPSVIFLTKRGRQVCADPSEEWVQKYVSDLELSA

SEQ ID NO: 382 - protein, 92 aa, Homo sapiens
MKLCVTVLSLLMLVAAFCSPALSAPMGSDPPTACCFSYTARKLPRNFVVDYYETSSLCSQPAVVFQTKRSKQVCADPSESWVQEYVYDLELN

SEQ ID NO: 383 - protein, 91 aa, Homo sapiens
MKVSAAALAVILIATALCAPASASPYSSDTTPCCFAYIARPLPRAHIKEYFYTSGKCSNPAVVFVTRKNRQVCANPEKKWVREYINSLEMS

SEQ ID NO: 384 - protein, 99 aa, Homo sapiens
MKASAALLCLLLTAAAFSPQGLAQPVGINTSTTCCYRFINKKIPKQRLESYRRTTSSHCPREAVIFKTKLDKEICADPTQKWVQDFMKHLDKKTQTPKL

SEQ ID NO: 385 - protein, 99 aa, Homo sapiens
MKVSAALLCLLLMAATFSPQGLAQPDSVSIPITCCFNVINRKIPIQRLESYTRITNIQCPKEAVIFKTKRGKEVCADPKERWVRDSMKHLDQIFQNLKP

SEQ ID NO: 386 - protein, 97 aa, Homo sapiens
MKVSAALLWLLLIAAAFSPQGLAGPASVPTTCCFNLANRKIPLQRLESYRRITSGKCPQKAVIFKTKLAKDICADPKKKWVQDSMKYLDQKSPTPKP

SEQ ID NO: 387 - protein, 98 aa, Homo sapiens
MKVSAVLLCLLLMTAAFNPQGLAQPDALNVPSTCCFTFSSKKISLQRLKSYVITTSRCPQKAVIFRTKLGKEICADPKEKWVQNYMKHLGRKAHTLKT

SEQ ID NO: 388 - protein, 93 aa, Homo sapiens
MKISVAAIPFFLLITIALGTKTESSSRGPYHPSECCFTYTTYKIPRQRIMDYYETNSQCSKPGIVFITKRGHSVCTNPSDKWVQDYIKDMKEN

SEQ ID NO: 389 - protein, 113 aa, Homo sapiens
MKVSVAALSCLMLVAVLGSQAQFINDAETELMMSKLPLENPVVLNSFHFAADCCTSYISQSIPCSLMKSYFETSSECSKPGVIFLTKKGRQVCAKPSGPGVQDCMKKLKPYSI

SEQ ID NO: 390 - protein, 120 aa, Homo sapiens
MKVSEAALSLLVLILIITSASRSQPKVPEWVNTPSTCCLKYYEKVLPRRLVVGYRKALNCHLPAIIFVTKRNREVCTNPNDDWVQEYIKDPNLPLLPTRNLSTVKIITAKNGQPQLLNSQ

SEQ ID NO: 391 - protein, 94 aa, Homo sapiens
MAPLKMLALVTLLLGASLQHIHAARGTNVGRECCLEYFKGAIPLRKLKTWYQTSEDCSRDAIVFVTVQGRAICSDPNNKRVKNAVKYLQSLERS

SEQ ID NO: 392 - protein, 89 aa, Homo sapiens
MKGLAAALLVLVCTMALCSCAQVGTNKELCCLVYTSWQIPQKFIVDYSETSPQCPKPGVILLTKRGRQICADPNKKWVQKYISDLKLNA

SEQ ID NO: 393 - protein, 98 aa, Homo sapiens
MALLLALSLLVLWTSPAPTLSGTNDAEDCCLSVTQKPIPGYIVRNFHYLLIKDGCRVPAVVFTTLRGRQLCAPPDQPWVERIIQRLQRTSAKMKRRSS

SEQ ID NO: 394 - protein, 96 aa, Homo sapiens
MCCTKSLLLAALMSVLLLHLCGESEAASNFDCCLGYTDRILHPKFIVGFTRQLANEGCDINAIIFHTKKKLSVCANPKQTWVKYIVRLLSKKVKNM

SEQ ID NO: 395 - protein, 134 aa, Homo sapiens
MAQSLALSLLILVLAFGIPRTQGSDGGAQDCCLKYSQRKIPAKVVRSYRKQEPSLGCSIPAILFLPRKRSQAELCADPKELWVQQLMQHLDKTPSPQKPAQGCRKDRGASKTGKKGKGSKGCKRTERSQTPKGP

SEQ ID NO: 396 - protein, 93 aa, Homo sapiens
MDRLQTALLVVLVLLAVALQATEAGPYGANMEDSVCCRDYVRYRLPLRVVKHFYWTSDSCPRPGVVLLTFRDKEICADPRVPWVKMILNKLSQ

SEQ ID NO: 397 - protein, 120 aa, Homo sapiens
MKVSVAALSCLMLVTALGSQARVTKDAETEFMMSKLPLENPVLLDRFHATSADCCISYTPRSIPCSLLESYFETNSECSKPGVIFLTKKGRRFCANPSDKQVQVCVRMLKLDTRIKTRKN

SEQ ID NO: 398 - protein, 119 aa, Homo sapiens
MAGLMTIVTSLLFLGVCAHHIIPTGSVVIPSPCCMFFVSKRIPENRVVSYQLSSRSTCLKAGVIFTTKKGQQFCGDPKQEWVQRYMKNLDAKQKKASPRARAVAVKGPVQRYPGNQTTC

SEQ ID NO: 399 - protein, 150 aa, Homo sapiens
MNLWLLACLVAGFLGAWAPAVHTQGVFEDCCLAYHYPIGWAVLRRAWTYRIQEVSGSCNLPAAIFYLPKRHRKVCGNPKSREVQRAMKLLDARNKVFAKLHHNTQTFQAGPHAVKKLSSGNSKLSSSKFSNPISSSKRNVSLLISANSGL

SEQ ID NO: 400 - protein, 94 aa, Homo sapiens
MMGLSLASAVLLASLLSLHLGTATRGSDISKTCCFQYSHKPLPWTWVRSYEFTSNSCSQRAVIFTTKRGKKVCTHPRKKWVQKYISLLKTPKQL

SEQ ID NO: 401 - protein, 112 aa, Homo sapiens
MKGPPTFCSLLLLSLLLSPDPTAAFLLPPSTACCTQLYRKPLSDKLLRKVIQVELQEADGDCHLQAFVLHLAQRSICIHPQNPSLSQWFEHQERKLHGTLPKLNFGMLRKMG

SEQ ID NO: 402 - protein, 127 aa, Homo sapiens
MQQRGLAIVALAVCAALHASEAILPIASSCCTEVSHHISRRLLERVNMCRIQRADGDCDLAAVILHVKRRRICVSPHNHTVKQWMKVQAAKKNGKGNVCHRKKHHGKRNSNRAHQGKHETYGHKTPY

SEQ ID NO: 403 - protein, 114 aa, Homo sapiens
MRLLILALLGICSLTAYIVEGVGSEVSDKRTCVSLTTQRLPVSRIKTYTITEGSLRAVIFITKRGLKVCADPQATWVRDVVRSMDRKSNTRNNMIQTKPTGTQQSTNTAVTLTG

SEQ ID NO: 404 - protein, 397 aa, Homo sapiens
MAPISLSWLLRLATFCHLTVLLAGQHHGVTKCNITCSKMTSKIPVALLIHYQQNQASCGKRAIILETRQHRLFCADPKEQWVKDAMQHLDRQAAALTRNGGTFEKQIGEVKPRTTPAAGGMDESVVLEPEATGESSSLEPTPSSQEAQRALGTSPELPTGVTGSSGTRLPPTPKAQDGGPVGTELFRVPPVSTAATWQSSAPHQPGPSLWAEAKTSEAPSTQDPSTQASTASSPAPEENAPSEGQRVWGQGQSPRPENSLEREEMGPVPAHTDAFQDWGPGSMAHVSVVPVSSEGTPSREPVASGSWTPKAEEPIHATMDPQRLGVLITPVPDAQAATRRQAVGLLAFLGLLFCLGVAMFTYQSLQGCPRKMAGEMAEGLRYIPRSCGSNSYVLVPV

SEQ ID NO: 405 - protein, 302 aa, Homo sapiens
MRLGSPGLLFLLFSSLRADTQEKEVRAMVGSDVELSCACPEGSRFDLNDVYVYWQTSESKTVVTYHIPQNSSLENVDSRYRNRALMSPAGMLRGDFSLRLFNVTPQDEQKFHCLVLSQSLGFQEVLSVEVTLHVAANFSVPVVSAPHSPSQDELTFTCTSINGYPRPNVYWINKTDNSLLDQALQNDTVFLNMRGLYDVVSVLRIARTPSVNIGCCIENVLLQQNLTVGSQTGNDIGERDKITENPVSTGEKNAATWSILAVLCLLVVVAVAIGWVCRDRCLQHSYAGAWAVSPETELTGHV

SEQ ID NO: 406 - protein, 288 aa, Homo sapiens
MGHTRRQGTSPSKCPYLNFFQLLVLAGLSHFCSGVIHVTKEVKEVATLSCGHNVSVEELAQTRIYWQKEKKMVLTMMSGDMNIWPEYKNRTIFDITNNLSIVILALRPSDEGTYECVVLKYEKDAFKREHLAEVTLSVKADFPTPSISDFEIPTSNIRRIICSTSGGFPEPHLSWLENGEELNAINTTVSQDPETELYAVSSKLDFNMTTNHSFMCLIKYGHLRVNQTFNWNTTKQEHFPDNLLPSWAITLISVNGIFVICCLTYCFAPRCRERRRNERLRRESVRPV

SEQ ID NO: 407 - protein, 329 aa, Homo sapiens
MDPQCTMGLSNILFVMAFLLSGAAPLKIQAYFNETADLPCQFANSQNQSLSELVVFWQDQENLVLNEVYLGKEKFDSVHSKYMGRTSFDSDSWTLRLHNLQIKDKGLYQCIIHHKKPTGMIRIHQMNSELSVLANFSQPEIVPISNITENVYINLTCSSIHGYPEPKKMSVLLRTKNSTIEYDGVMQKSQDNVTELYDVSISLSVSFPDVTSNMTIFCILETDKTRLLSSPFSIELEDPQPPPDHIPWITAVLPTVIICVMVFCLILWKWKKKKRPRNSYKCGTNTMEREESEQTKKREKIHIPERSDEAQRVFKSSKTSSCDKSDTCF

SEQ ID NO: 408 - protein, 365 aa, Artificial Sequence
  Synthesized
PGWFLDSPDRPWNPPTFSPALLVVTEGDNATFTCSFSNTSESFVLNWYRMSPSNQTDKLAAFPEDRSQPGQDCRFRVTQLPNGRDFHMSVVRARRNDSGTYLCGAISLAPKAQIKESLRAELRVTERRAEVPTAHPSPSPRPAGQFQTLVVGVVGGLLGSLVLLVWVLAVICSRAARGTIGARRTGQPLKEDPSAVPVFSVDYGELDFQWREKTPEPPVPCVPEQTEYATIVFPSGMGTSSPARRGSADGPRSAQPLRPEDGHCSWPLCSRAARGTIGARRTGQPLKEDPSAVPVFSVDYGELDFQWREKTPEPPVPCVPEQTEYATIVFPSGMGTSSPARRGSADGPRSAQPLRPEDGHCSWPL

SEQ ID NO: 409 - protein, 272 aa, Artificial Sequence
  Synthesized
FTVTVPKDLYVVEYGSNMTIECKFPVEKQLDLAALIVYWEMEDKNIIQFVHGEEDLKVQHSSYRQRARLLKDQLSLGNAALQITDVKLQDAGVYRCMISYGGADYKRITVKVNAPYNKINQRILVVDPVTSEHELTCQAEGYPKAEVIWTSSDHQVLSGKTTTTNSKREEKLFNVTSTLRINTTTNEIFYCTFRRLDPEENHTAELVIPELPLAHPPNERTHLVILGAILLCLGVALTFIFRLRKGRMMDVKKCGIQDTNSKKQSDTHLEET

SEQ ID NO: 410 - protein, 240 aa, Artificial Sequence
  Synthesized
DIVMTQSHKFMSTSIGARVSITCKASQDVRTAVAWYQQKPGQSPKLLIYSASYRYTGVPDRFTGSGSGTDFTFTISSVQAEDLAVYYCQQHYGTPPWTFGGGTKLEIKGGGGSGGGGSGGGGSEVQLVESGGGLVKPGGSLKLSCEASRFTFSSYAMSWVRQTPEKRLEWVAAISGGGRYTYYPDSMKGRFTISRDNAKNFLYLQMSSLRSEDTAMYYCARHYDGYLDYWGQGTTLTVSS

SEQ ID NO: 411 - protein, 238 aa, Artificial Sequence
  Synthesized
DIVMTQSHKFMSTSIGARVSITCKASQDVRTAVAWYQQKPGQSPKWYSASYRYTGVPDRFTGSGSGTDFTFTISSVQAEDLAVYYCQQHYGTPPWTFGGGTKLEIKGGGGSGGGGSGGGGSEVQLVESGGGLVKPGGSLKLSCEASRFTFSSYAMSWVRQTPEKRLEWVAAISGGGRYTYYPDSMKGRFTISRDNAKNFLYLQMSSLRSEDTAMYYCARHYDGYLDYWGQGTTLTVSS

SEQ ID NO: 412 - protein, 244 aa, Artificial Sequence
  Synthesized
EVQLVESGGGLVQPGGSLRLSCAASGFTFSSFGMHWVRQAPGKGLEWVAYISSDSSAIYYADTVKGRFTISRDNAKNSLYLQMNSLRDEDTAVYYCGRGRENIYYGSRLDYWGQGTTVTVSSGGGGSGGGGSGGGGSDIQLTQSPSFLSASVGDRVTITCKASQNVDTNVAWYQQKPGKAPKALIYSASYRYSGVPSRFSGSGSGTDFTLTISSLQPEDFATYYCQQYNNYPFTFGQGTKLEIK

SEQ ID NO: 413 - protein, 219 aa, Homo sapiens
ELCDDDPPEIPHATFKAMAYKEGTMLNCECKRGFRRIKSGSLYMLCTGNSSHSSWDNQCQCTSSATRNTTKQVTPQPEEQKERKTTEMQSPMQPVDQASLPGHCREPPPWENEATERIYHFVVGQMVYYQCVQGYRALHRGPAESVCKMTHGKTRWTQPQLICTGEMETSQFPGEEKPQASPEGRPESETSCLVTTTDFQIQTEMAATMETSIFTTEYQ

SEQ ID NO: 414 - protein, 19 aa, Homo sapiens
VAVAGCVFLLISVLLLSGL

SEQ ID NO: 415 - protein, 13 aa, Homo sapiens
TWQRRQRKSRRTI

SEQ ID NO: 416 - protein, 346 aa, Homo sapiens
LAPRRCPAQEVARGVLTSLPGDSVTLTCPGVEPEDNATVHWVLRKPAAGSHPSRWAGMGRRLLLRSVQLHDSGNYSCYRAGRPAGTVHLLVDVPPEEPQLSCFRKSPLSNVVCEWGPRSTPSLTTKAVLLVRKFQNSPAEDFQEPCQYSQESQKFSCQLAVPEGDSSFYIVSMCVASSVGSKFSKTQTFQGCGILQPDPPANITVTAVARNPRWLSVTWQDPHSWNSSFYRLRFELRYRAERSKTFTTWMVKDLQHHCVIHDAWSGLRHVVQLRAQEEFGQGEWSEWSPEAMGTPWTESRSPPAENEVSTPMQALTTNKDDDNILFRDSANATSLPVQDSSSVPLP

SEQ ID NO: 417 - protein, 21 aa, Homo sapiens
TFLVAGGSLAFGTLLCIAIVL

SEQ ID NO: 418 - protein, 82 aa, Homo sapiens
RFKKTWKLRALKEGKTSMHPPYSLGQLVPERPRPTPVLVPLISPPVSPSSLGSDNTSSHNRPDARDPRSPYDISNTDYFFPR

SEQ ID NO: 419 - protein, 219 aa, Homo sapiens
ESGYAQNGDLEDAELDDYSFSCYSQLEVNGSQHSLTCAFEDPDVNITNLEFEICGALVEVKCLNFRKLQEIYFIETKKFLLIGKSNICVKVGEKSLTCKKIDLTTIVKPEAPFDLSVVYREGANDFVVTFNTSHLQKKYVKVLMHDVAYRQEKDENKWTHVNLSSTKLTLLQRKLQPAAMYEIKVRSIPDHYFKGFWSEWSPSYYFRTPEINNSSGEMD

SEQ ID NO: 420 - protein, 25 aa, Homo sapiens
PILLTISILSFFSVALLVILACVLW

SEQ ID NO: 421 - protein, 195 aa, Homo sapiens
KKRIKPIVWPSLPDHKKTLEHLCKKPRKNLNVSFNPESFLDCQIHRVDDIQARDEVEGFLQDTFPQQLEESEKQRLGGDVQSPNCPSEDVVITPESFGRDSSLTCLAGNVSACDAPILSSSRSLDCRESGKNGPHVYQDLLLSLGTTNSTLPPPFSLQSGILTLNPVAQGQPILTSLGSNQEEAYVTMSSFYQNQ

SEQ ID NO: 422 - protein, 522 aa, Homo sapiens
CRTSECCFQDPPYPDADSGSASGPRDLRCYRISSDRYECSWQYEGPTAGVSHFLRCCLSSGRCCYFAAGSATRLQFSDQAGVSVLYTVTLWVESWARNQTEKSPEVTLQLYNSVKYEPPLGDIKVSKLAGQLRMEWETPDNQVGAEVQFRHRTPSSPWKLGDCGPQDDDTESCLCPLEMNVAQEFQLRRRQLGSQGSSWSKWSSPVCVPPENPPQPQVRFSVEQLGQDGRRRLTLKEQPTQLELPEGCQGLAPGTEVTYRLQLHMLSCPCKAKATRTLHLGKMPYLSGAAYNVAVISSNQFGPGLNQTWHIPADTHTEPVALNISVGTNGTTMYWPARAQSMTYCIEWQPVGQDGGLATCSLTAPQDPDPAGMATYSWSRESGAMGQEKCYYITIFASAHPEKLTLWSTVLSTYHFGGNASAAGTPHHVSVKNHSLDSVSVDWAPSLLSTCPGVLKEYVVRCRDEDSKQVSEHPVQPTETQVTLSGLRAGVAYTVQVRADTAWLRGVWSQPQRFSIEVQVSD

SEQ ID NO: 423 - protein, 25 aa, Homo sapiens
WLIFFASLGSFLSILLVGVLGYLGL

SEQ ID NO: 424 - protein, 92 aa, Homo sapiens
NRAARHLCPPLPTPCASSAIEFPGGKETWQWINPVDFQEEASLQEALVVEMSWDKGERTEPLEKTELPEGAPELALDTELSLEDGDRCKAKM

SEQ ID NO: 425 - protein, 175 aa, Homo sapiens
ITCPPPMSVEHADIWVKSYSLYSRERYICNSGFKRKAGTSSLTECVLNKATNVAHWTTPSLKCIRDPALVHQRPAPPSTVTTAGVTPQPESLSPSGKEPAASSPSSNNTAATTAAIVPGSQLMPSKSPSTGTTEISSHESSHGTPSQTTAKNWELTASASHQPPGVYPQGHSDTT

SEQ ID NO: 426 - protein, 23 aa, Homo sapiens
VAISTSTVLLCGLSAVSLLACYL

SEQ ID NO: 427 - protein, 39 aa, Homo sapiens; identical to SEQ ID NO: 318

SEQ ID NO: 428 - protein, 213 aa, Homo sapiens
CPDLVCYTDYLQTVICILEMWNLHPSTLTLTWQDQYEELKDEATSCSLHRSAHNATHATYTCHMDVFHFMADDIFSVNITDQSGNYSQECGSFLLAESIKPAPPFNVTVTFSGQYNISWRSDYEDPAFYMLKGKLQYELQYRNRGDPWAVSPRRKLISVDSRSVSLLPLEFRKDSSYELQVRAGPMPGSSYQGTWSEWSDPVIFQTQSEELKE

SEQ ID NO: 429 - protein, 21 aa, Homo sapiens
GWNPHLLLLLLLVIVFIPAFW

SEQ ID NO: 430 - protein, 285 aa, Homo sapiens
SLKTHPLWRLWKKIWAVPSPERFFMPLYKGCSGDFKKWVGAPFTGSSLELGPWSPEVPSTLEVYSCHPPRSPAKRLQLTELQEPAELVESDGVPKPSFWPTAQNSGGSAYSEERDRPYGLVSIDTVTVLDAEGPCTWPCSCEDDGYPALDLDAGLEPSPGLEDPLLDAGTTVLSCGCVSAGSPGLGGPLGSLLDRLKPPLADGEDWAGGLPWGGRSPGGVSESEAGSPLAGLDMDTFDSGFVGSDCSSPVECDFTSPGDEGPPRSYLRQWVVIPPPLSSPGPQAS

SEQ ID NO: 431 - protein, 332 aa, Homo sapiens
GITNINCSGHIWVEPATIFKMGMNISIYCQAAIKNCQPRKLHFYKNGIKERFQITRINKTTARLWYKNFLEPHASMYCTAECPKHFQETLICGKDISSGYPPDIPDEVTCVIYEYSGNMTCTWNAGKLTYIDTKYVVHVKSLETEEEQQYLTSSYINISTDSLQGGKKYLVWVQAANALGMEESKQLQIHLDDIVIPSAAVISRAETINATVPKTIIYWDSQTTIEKVSCEMRYKATTNQTWNVKEFDTNFTYVQQSEFYLEPNIKYVFQVRCQETGKRYWQPWSSLFFHKTPETVPQVTSKAFQHDTWNSGLTVASISTGHLTSDNRGDIG

SEQ ID NO: 432 - protein, 21 aa, Homo sapiens
LLLGMIVFAVMLSILSLIGIF

SEQ ID NO: 433 - protein, 253 aa, Homo sapiens; identical to SEQ ID NO: 316

SEQ ID NO: 434 - protein, 22 aa, Homo sapiens
MALIVLGGVAGLLLFIGLGIFF

SEQ ID NO: 435 - protein, 40 aa, Homo sapiens
CVRCRHRRRQAERMSQIKRLLSEKKTCQCPHRFQKTCSPI

SEQ ID NO: 436 - protein, 21 aa, Homo sapiens
IYIWAPLAGTCGVLLLSLVIT

SEQ ID NO: 437 - protein, 32 aa, Homo sapiens
LYCNHRNRRRVCKCPRPVVKSGDKPSLSARYV

SEQ ID NO: 438 - protein, 21 aa, Homo sapiens
ILVIFSGMFLVFTLAGALFLH

SEQ ID NO: 439 - protein, 48 aa, Homo sapiens
QRRKYRSNKGESPVEPAEPCHYSCPREEEGSTIPIQEDYRKPEPACSP

SEQ ID NO: 440 - protein, 27 aa, Homo sapiens
FWVLVVVGGVLACYSLLVTVAFIIFWV

SEQ ID NO: 441 - protein, 41 aa, Homo sapiens
RSKRSRLLHSDYMNMTPRRPGPTRKHYQPYAPPRDFAAYRS

SEQ ID NO: 442 - protein, 27 aa, Homo sapiens
IISFFLALTSTALLFLLFFLTLRFSVV

SEQ ID NO: 443 - protein, 42 aa, Homo sapiens; identical to SEQ ID NO: 3

SEQ ID NO: 444 - protein, 21 aa, Homo sapiens
VGVVGGLLGSLVLLVWVLAVI

SEQ ID NO: 445 - protein, 97 aa, Homo sapiens
CSRAARGTIGARRTGQPLKEDPSAVPVFSVDYGELDFQWREKTPEPPVPCVPEQTEYATIVFPSGMGTSSPARRGSADGPRSAQPLRPEDGHCSWPL

SEQ ID NO: 446 - protein, 21 aa, Homo sapiens
THLVILGAILLCLGVALTFIF

SEQ ID NO: 447 - protein, 31 aa, Homo sapiens
RLRKGRMMDVKKCGIQDTNSKKQSDTHLEET

SEQ ID NO: 448 - protein, 153 aa, Homo sapiens; identical to SEQ ID NO: 285

SEQ ID NO: 449 - protein, 177 aa, Homo sapiens; identical to SEQ ID NO: 289

SEQ ID NO: 450 - protein, 219 aa, Homo sapiens
MCPARSLLLVATLVLLDHLSLARNLPVATPDPGMFPCLHHSQNLLRAVSNMLQKARQTLEFYPCTSEEIDHEDITKDKTSTVEACLPLELTKNESCLNSRETSFITNGSCLASRKTSFMMALCLSSIYEDLKMYQVEFKTMNAKLLMDPKRQIFLDQNMLAVIDELMQALNFNSETVPQKSSLEEPDFYKTKIKLCILLHAFRIRAVTIDRVMSYLNAS

SEQ ID NO: 451 - protein, 162 aa, Homo sapiens; identical to SEQ ID NO: 291

SEQ ID NO: 452 - protein, 155 aa, Homo sapiens
MERIVICLMVIFLGTLVHKSSSQGQDRHMIRMRQLIDIVDQLKNYVNDLVPEFLPAPEDVETNCEWSAFSCFQKAQLKSANTGNNERIINVSIKKLKRKPPSTNAGRRQKHRLTCPSCDSYEKKPPKEFLERFKSLLQKMIHQHLSSRTHGSEDS

SEQ ID NO: 453 - protein, 189 aa, Homo sapiens; identical to SEQ ID NO: 303

SEQ ID NO: 454 - protein, 270 aa, Homo sapiens
MKPKMKYSTNKISTAKWKNTASKALCFKLGKSQQKAKEVCPMYFMKLRSGLMIKKEACYFRRETTKRPSLKTGRKHKRHLVLAACQQQSTVECFAFGISGVQKYTRALHDSSITGISPITEYLASLSTYNDQSITFALEDESYEIYVEDLKKDEKKDKVLLSYYESQHPSNESGDGVDGKMLMVTLSPTKDFWLHANNKEHSVELHKCEKPLPDQAFFVLHNMHSNCVSFECKTDPGVFIGVKDNHLALIKVDSSENLCTENILFKLSET

SEQ ID NO: 455 - protein, 177 aa, Homo sapiens
GPQREEFPRDLSLISPLAQAVRSSSRTPSDKPVAHVVANPQAEGQLQWLNRRANALLANGVELRDNQLVVPSEGLYLIYSQVLFKGQGCPSTHVLLTHTISRIAVSYQTKVNLLSAIKSPCQRETPEGAEAKPWYEPIYLGGVFQLEKGDRLSAEINRPDYLDFAESGQVYFGIIAL

SEQ ID NO: 456 - protein, 205 aa, Homo sapiens
MTPPERLFLPRVCGTTLHLLLLGLLLVLLPGAQGLPGVGLTPSAAQTARQHPKMHLAHSTLKPAAHLIGDPSKQNSLLWRANTDRAFLQDGFSLSNNSLLVPTSGIYFVYSQVVFSGKAYSPKATSSPLYLAHEVQLFSSQYPFHVPLLSSQKMVYPGLQEPWLHSMYHGAAFQLTQGDQLSTHTDGIPHLVLSPSTVFFGAFAL

SEQ ID NO: 457 - protein, 74 aa, Homo sapiens
GIIQHDLIFSLQQTECVLKPVESSDMKMTQLFTKVESEDTSSLFDKLKKEPDALTLLAPAAGDTIISLDFGSND

SEQ ID NO: 458 - protein, 224 aa, Homo sapiens
SEDTSSLFDKLKKEPDALTLLAPAAGDTIISLDFGSNDTETDDQQLEEVPLYNDVMLPSPNEKLQNINLAMSPLPTAETPKPLRSSADPALNQEVALKLEPNPESLELSFTMPQIQDQTPSPSDGSTRQSSPEPNSPSEYCFYVDSDMVNEFKLELVEKLFAEDTEAKNPFSTQDTDLDLEMLAPYIPMDDDFQLRSFDQLSPLESSSASPESASPQSTVTVFQ

SEQ ID NO: 459 - DNA, 750 bp, Homo sapiens
gacatcgtgatgacccagtcccctctgtctttacccgttacacccggtgaacccgccagcattagctgtaggtccaccaagtctttactgcacagcaacggcaacacctatttatactggttcttacagaagcccggccaatccccccagctgctgatctatcgtatgagcaatttagctagcggcgtgcccgacagattcagcggcagcggctccggaaccgacttcactttaaagatctccagagtggaggccgaggacgtgggcgtttactactgcatgcagcatttagagtaccccttcaccttcggcggcggcaccaaggtggagatcaagggtggcggcggcagcggcggcggtggcagcggaggcggaggcagcgagatccagctgcagcaaagcggcgccgaggtgaaaaagcccggcagcagcgtcaaggtgagctgcaaggccagcggctacaccttcaccgattacgacatgcactgggtgagacaagctcccggtcaaggtttagagtggatcggcacaatcgaccccgagaccggcggcacagcctacaaccagaagtttaagggtcgtgccactttaacagccgatcgttccaccagcaccgcctacatggagctgagctctttaaggtccgaggacaccgctgtgtactattgcaccagcttctattacacctacagcaactacgacgtgggctttgcctactggggccaaggtaccctcgtgacagtcagcagc

SEQ ID NO: 460 - DNA, 750 bp, Homo sapiens
gacatcgtgatgacccagagccccctctctttacccgttacacccggtgagcccgctagcatcagctgtcgtagcaccaagtccttattacactccaacggcaacacctatttatactggttcctccagaaacccggccagtccccccagctgctgatctatcgtatgagcaatttagcctccggcgtgcccgatagatttagcggcagcggtagcggcaccgactttactttaaagatctctcgtgtggaggccgaggacgtgggtgtgtactactgcatgcagcatttagagtaccccttcacctttggcggcggcaccaaggtggagatcaaaggcggcggaggaagcggcggcggcggctccggcggcggaggctccgagattcagctccagcagagcggcgccgaggtgaaaaaacccggctcctccgtgaaggtgtcttgtaaggccagcggctacaccttcacagactacgacatgcactgggtgaggcaagctcccggtcaaggactggagtggatgggcaccatcgaccccgaaactggtggcacagcctacaaccagaagttcaagggtcgtgtgaccatcaccgccgataagagcacctccaccgcctacatggagctgagctctttaaggagcgaggacaccgccgtgtattactgcaccagcttctactacacctacagcaactacgacgtgggcttcgcctactggggccaaggtactttagtgaccgtgtccagc

SEQ ID NO: 461 - DNA, 750 bp, Homo sapiens
gacatcgtgatgacccagagccctctgtctttacccgtgacacccggtgagcccgctagcattagctgtcgttccaccaagtctttactgcactccaacggcaacacctatttatactggtatttacagaagcccggccagagcccccagctgctgatctataggatgagcaatttagccagcggcgtgcccgatagattcagcggcagcggaagcggcaccgacttcactttaaagatcagcagagtggaagccgaggacgtgggtgtgtactactgcatgcagcatttagagtaccccttcaccttcggcggcggaaccaaggtggagatcaagggcggcggcggcagcggcggaggaggaagcggaggcggcggctccgagattcagctgcagcaaagcggcgccgaggtgaaaaagcccggtagcagcgtgaaggtgagctgtaaggccagcggctacaccttcaccgactacgatatgcactgggtgaagcaagcccccggtcacggactggagtggatcggcaccattgaccccgagactggtggcaccgcctacaaccagaaattcaagggcaaggccacactgaccgccgatcgttccaccagcacagcctatatggagctgagctctttaaccagcgaggacaccgccgtgtattactgcacctccttttactacacctacagcaactacgacgtgggcttcgcctactggggccaaggtactttagtgaccgtgagctcc

SEQ ID NO: 462 - DNA, 750 bp, Homo sapiens
gacattgtcatgacacagagccctctgtctttacccgttacacccggcgaacccgctagcatcagctgtcgttccaccaaatctttactgcactccaacggcaacacctatttatactggttcttacagaagcccggccaaagcccccagctgctgatttatcgtatgagcaatttagccagcggcgtgcccgatcgtttttccggcagcggcagcggcacagacttcactttaaagatcagcagagtggaggccgaggacgtgggcgtgtactactgcatgcagcacctcgagtacccctttaccttcggcggcggcaccaaagtggagatcaagggaggaggaggatccggcggaggaggaagcggaggcggcggctccgagattcagctgcagcagagcggcgctgaggtgaaaaagcccggcagcagcgtgaaggtgtcttgtaaagcctccggctacaccttcaccgactacgatatgcactgggtgaagcaagctcccggtcaaggtctggagtggatcggcaccatcgatcccgaaaccggcggtaccgcctacaaccagaagttcaaaggcaaggccactttaaccgccgacagaagcacaagcaccgcttacatggagctgtcctctttaagatccgaggacaccgccgtgtattactgcacaagcttctactacacctactccaactacgacgtcggcttcgcctactggggccaaggcactttagtgacagtgagcagc

SEQ ID NO: 463 - DNA, 750 bp, Homo sapiens
gacatcgtgatgacccagagccctctgtctttacccgtgacacccggtgagcccgctagcattagctgtcgttccaccaagtctttactgcactccaacggcaacacctatttatactggttcttacagaagcccggccagagcccccagctgctgatctataggatgagcaatttagccagcggcgtgcccgatagattcagcggcagcggaagcggcaccgacttcactttaaagatcagcagagtggaagccgaggacgtgggtgtgtactactgcatgcagcatttagagtaccccttcaccttcggcggcggaaccaaggtggagatcaagggcggcggcggcagcggcggaggaggaagcggaggcggcggctccgagattcagctgcagcaaagcggcgccgaggtgaaaaagcccggtagcagcgtgaaggtgagctgtaaggccagcggctacaccttcaccgactacgatatgcactgggtgaagcaagcccccggtcacggactggagtggatcggcaccattgaccccgagactggtggcaccgcctacaaccagaaattcaagggcaaggccacactgaccgccgatcgttccaccagcacagcctatatggagctgagctctttaaccagcgaggacaccgccgtgtattactgcacctccttttactacacctacagcaactacgacgtgggcttcgcctactggggccaaggtactttagtgaccgtgagctcc

SEQ ID NO: 464 - DNA, 714 bp, Homo sapiens
agcagcgagctgacccaagatcccgctgtgtccgtggctttaggccagaccgtgaggatcacttgtcgtggcgactctttaaggaagtactacgccagctggtaccagcagaagcccagacaagctcctcagctggtgatctaccacaagaacaacagagccagcggcatccccgatcgtttctccggctccatcagcggcaacaccgcctctttaaccatcaccggagctcaagctgaggacgaagccgcctacttctgcaactctcgtgacaccagcggcaactatttagtgttcggcggaggcaccaaggtgaccgtgctgggaggcggaggaggcagcggcggcggcggctccggaggaggcggctcccagctgcaactgcaagaaagcggacccggtttagtgaaaccctccgagactttatctttaacttgtgctgtgtccggagccagcatcagcaactggtggtcttgggtgagacagccccccggcaaaggactggagtggatcggcgaggtgcaccacagcggcgtgaccacctacaagccctctttaaagtctcgtgtgaccatcagcgtggacaacagcaagaaccagctgtctttaaagctgacaagcgtgaccgccgctgacaccgccgtgtactactgcgccagagagttcgccgatgacgccttcgacatctggggaaggggcaccatggtgaccgtg

SEQ ID NO: 465 - DNA, 750 bp, Homo sapiens
gacatcgtgatgacccagagccccctctctttacccgttacacccggtgagcccgctagcatcagctgtcgtagcaccaagtccttattacactccaacggcaacacctatttatactggtacctccagaaacccggccagtccccccagctgctgatctatcgtatgagcaatttagcctccggcgtgcccgatagatttagcggcagcggtagcggcaccgactttactttaaagatctctcgtgtggaggccgaggacgtgggtgtgtactactgcatgcagcatttagagtaccccttcacctttggcggcggcaccaaggtggagatcaaaggcggcggaggaagcggcggcggcggctccggcggcggaggctccgagattcagctccagcagagcggcgccgaggtgaaaaaacccggctcctccgtgaaggtgtcttgtaaggccagcggctacaccttcacagactacgacatgcactgggtgaggcaagctcccggtcaaggactggagtggatgggcaccatcgaccccgaaactggtggcacagcctacaaccagaagttcaagggtcgtgtgaccatcaccgccgataagagcacctccaccgcctacatggagctgagctctttaaggagcgaggacaccgccgtgtattactgcaccagcttctactacacctacagcaactacgacgtgggcttcgcctactggggccaaggtactttagtgaccgtgtccagc

SEQ ID NO: 466 - DNA, 750 bp, Homo sapiens
gacatcgtgatgacccagtcccctctgtctttacccgttacacccggtgaacccgccagcattagctgtaggtccaccaagtctttactgcacagcaacggcaacacctatttatactggtatttacagaagcccggccaatccccccagctgctgatctatcgtatgagcaatttagctagcggcgtgcccgacagattcagcggcagcggctccggaaccgacttcactttaaagatctccagagtggaggccgaggacgtgggcgtttactactgcatgcagcatttagagtaccccttcaccttcggcggcggcaccaaggtggagatcaagggtggcggcggcagcggcggcggtggcagcggaggcggaggcagcgagatccagctgcagcaaagcggcgccgaggtgaaaaagcccggcagcagcgtcaaggtgagctgcaaggccagcggctacaccttcaccgattacgacatgcactgggtgagacaagctcccggtcaaggtttagagtggatcggcacaatcgaccccgagaccggcggcacagcctacaaccagaagtttaagggtcgtgccactttaacagccgatcgttccaccagcaccgcctacatggagctgagctctttaaggtccgaggacaccgctgtgtactattgcaccagcttctattacacctacagcaactacgacgtgggctttgcctactggggccaaggtaccctcgtgacagtcagcagc

SEQ ID NO: 467 - protein, 10 aa, Artificial Sequence
  Synthesized
GGGGSGGGGS

SEQ ID NO: 468 - protein, 10 aa, Artificial Sequence
  Synthesized
EAAAREAAAR

SEQ ID NO: 469 - DNA, 390 bp, Artificial Sequence
  Synthesized
tcgaggtcgacggtatcgataagcttgatatcgaattaggaggaaaaactgtttcatacagaaggcgtcaattaggaggaaaaactgtttcatacagaaggcgtcaattaggaggaaaaactgtttcatacagaaggcgtcaattggtcccatcgaattaggaggaaaaactgtttcatacagaaggcgtcaattaggaggaaaaactgtttcatacagaaggcgtcaattaggaggaaaaactgtttcatacagaaggcgtcaattggtcccgggacattttgacacccccataatatttttccagaattaacagtataaattgcatctcttgttcaagagttccctatcactctctttaatcactactcacagtaacctcaactcctg
